(19) United States
(12) Patent Application Publication
(10) Pub. No.: US 2007/0237764 A1
(43) Pub. Date: Oct. 11, 2007

(54) BINDING POLYPEPTIDES WITH RESTRICTED DIVERSITY SEQUENCES

(75) Inventors: Sara C. Birtalan, Menlo Park, CA (US); Frederic Fellouse, Toronto (CA); Sachdev S. Sidhu, San Francisco, CA (US)

Correspondence Address: MERCHANT & GOULD PC, P.O. BOX 2903, MINNEAPOLIS, MN, 55402-0903, US

(73) Assignee: Genentech, Inc., South San Francisco, CA (US)

(21) Appl. No.: 11/565,880

(22) Filed: Dec. 1, 2006

Related U.S. Application Data
(60) Provisional application No. 60/805,553, filed on Jun. 22, 2006.
(60) Provisional application No. 60/742,184, filed on Dec. 2, 2005.

(51) Int. Cl. C07K 16/18; A61K 39/395; C07H 21/04; C07K 16/46; C12N 5/16; G01N 33/563; C12N 15/63; C07K 1/00; C07K 14/00

(52) U.S. Cl. 424/133.1; 435/326; 436/512; 530/350; 530/387.1; 530/387.3; 536/23.53

(57) ABSTRACT

The invention provides variant CDRs comprising highly restricted amino acid sequence diversity. These polypeptides provide a flexible and simple source of sequence diversity that can be used as a source for identifying novel antigen binding polypeptides. The invention also provides these polypeptides as fusion polypeptides to heterologous polypeptides such as at least a portion of phage or viral coat proteins, tags and linkers. Libraries comprising a plurality of these polypeptides are also provided. In addition, methods of and compositions for generating and using these polypeptides and libraries are provided.

### CROSS REFERENCE TO RELATED APPLICATIONS

[0001] This application is a nonprovisional application which claims priority to U.S. Ser. No. 60/742,184 filed Dec. 2, 2005 and U.S. Ser. No. 60/805,553 filed Jun. 22, 2006, all of which applications are incorporated by reference herein.

### FIELD OF THE INVENTION

[0002] The invention generally relates to variant CDRs diversified using highly limited amino acid repertoires, and libraries comprising a plurality of such sequences. The invention also relates to fusion polypeptides comprising these variant CDRs. The invention also relates to methods and compositions useful for identifying novel binding polypeptides that can be used therapeutically or as reagents.

### BACKGROUND

[0003] Phage display technology has provided a powerful tool for generating and selecting novel proteins that bind to a ligand, such as an antigen. Using the techniques of phage display allows the generation of large libraries of protein variants that can be rapidly sorted for those sequences that bind to a target antigen with high affinity. Nucleic acids encoding variant polypeptides are fused to a nucleic acid sequence encoding a viral coat protein, such as the gene III protein or the gene VIII protein. Monovalent phage display systems where the nucleic acid sequence encoding the protein or polypeptide is fused to a nucleic acid sequence encoding a portion of the gene III protein have been developed. (Bass, S., Proteins, 8:309 (1990); Lowman and Wells, Methods: A Companion to Methods in Enzymology, 3:205 (1991)). In a monovalent phage display system, the gene fusion is expressed at low levels and wild type gene III proteins are also expressed so that infectivity of the particles is retained. Methods of generating peptide libraries and screening those libraries have been disclosed in many patents (e.g. U.S. Pat. No. 5,723,286, U.S. Pat. No. 5,432, 018, U.S. Pat. No. 5,580,717, U.S. Pat. No. 5,427,908 and U.S. Pat. No. 5,498,530).

[0004] The demonstration of expression of peptides on the surface of filamentous phage and the expression of functional antibody fragments in the periplasm of E. coli was important in the development of antibody phage display libraries. (Smith et al., Science (1985), 228:1315; Skerra and Pluckthun, Science (1988), 240:1038). Libraries of antibodies or antigen binding polypeptides have been prepared in a number of ways including by altering a single gene by inserting random DNA sequences or by cloning a family of related genes. Methods for displaying antibodies or antigen binding fragments using phage display have been described in U.S. Pat. Nos. 5,750,373, 5,733,743, 5,837,242, 5,969,108, 6,172,197, 5,580,717, and 5,658,727. The library is then screened for expression of antibodies or antigen binding proteins with desired characteristics.

[0005] Phage display technology has several advantages over conventional hybridoma and recombinant methods for preparing antibodies with the desired characteristics. This technology allows the development of large libraries of antibodies with diverse sequences in less time and without the use of animals. Preparation of hybridomas or preparation of humanized antibodies can easily require several months of preparation. In addition, since no immunization is required, phage antibody libraries can be generated for antigens which are toxic or have low antigenicity (Hogenboom, Immunotechniques (1988), 4:1-20). Phage antibody libraries can also be used to generate and identify novel human antibodies.

[0006] Antibodies have become very useful as therapeutic agents for a wide variety of conditions. For example, humanized antibodies to HER-2, a tumor antigen, are useful in the diagnosis and treatment of cancer. Other antibodies, such as anti-INF-γ antibody, are useful in treating inflammatory conditions such as Crohn's disease. Phage display libraries have been used to generate human antibodies from immunized and non-immunized humans, germ line sequences, or naïve B cell Ig repertories (Barbas & Burton, Trends Biotech (1996), 14:230; Griffiths et al., EMBO J. (1994), 13:3245; Vaughan et al., Nat. Biotech. (1996), 14:309; Winter EP 0368 684 B1). Naïve, or nonimmune, antigen binding libraries have been generated using a variety of lymphoidal tissues. Some of these libraries are commercially available, such as those developed by Cambridge Antibody Technology and Morphosys (Vaughan et al., Nature Biotech 14:309 (1996); Knappik et al., J. Mol. Biol. 296:57 (1999)). However, many of these libraries have limited diversity.

[0007] The ability to identify and isolate high affinity antibodies from a phage display library is important in isolating novel human antibodies for therapeutic use. Isolation of high affinity antibodies from a library is traditionally thought to be dependent, at least in part, on the size of the library, the efficiency of production in bacterial cells and the diversity of the library. See, e.g., Knappik et al., J. Mol. Biol. (1999), 296:57. The size of the library is decreased by inefficiency of production due to improper folding of the antibody or antigen binding protein and the presence of stop codons. Expression in bacterial cells can be inhibited if the antibody or antigen binding domain is not properly folded. Expression can be improved by mutating residues in turns at the surface of the variable/constant interface, or at selected CDR residues. (Deng et al., J. Biol. Chem. (1994), 269:9533, Ulrich et al., PNAS (1995), 92:11907-11911; Forsberg et al., J. Biol. Chem. (1997), 272 :12430). The sequence of the framework region is a factor in providing for proper folding when antibody phage libraries are produced in bacterial cells.

[0008] Generating a diverse library of antibodies or antigen binding proteins is also important to isolation of high affinity antibodies. Libraries with diversification in limited CDRs have been generated using a variety of approaches. See, e.g., Tomlinson, Nature Biotech. (2000), 18:989-994. CDR3 regions are of interest in part because they often are found to participate in antigen binding. CDR3 regions on the heavy chain vary greatly in size, sequence and structural conformation.

[0009] Others have also generated diversity by randomizing CDR regions of the variable heavy and light chains using all 20 amino acids at each position. It was thought that using all 20 amino acids would result in a large diversity of sequences of variant antibodies and increase the chance of identifying novel antibodies. (Barbas, PNAS 91:3809 (1994); Yelton, D E, J. Immunology, 155:1994 (1995); Jackson, J. R., J. Immunology, 154:3310 (1995) and Hawkins, R E, J. Mol. Biology, 226:889 (1992)).

[0010] There have also been attempts to create diversity by restricting the group of amino acid substitutions in some CDRs to reflect the amino acid distribution in naturally occurring antibodies. See, Garrard & Henner, Gene (1993), 128:103; Knappik et al., J. Mol. Biol. (1999), 296:57. However, these attempts have had varying success and have not been applied in a systematic and quantitative manner. Creating diversity in the CDR regions while minimizing the number of amino acid changes has been a challenge. Furthermore, in some instances, once a first library has been generated according to one set of criteria, it may be desirable to further enhance the diversity of the first library. However, this requires that the first library has sufficient diversity and yet remain sufficiently small in size such that further diversity can be introduced without substantially exceeding practical limitations such as yield, etc.

[0011] Some groups have reported theoretical and experimental analyses of the minimum number of amino acid repertoire that is needed for generating proteins. However, these analyses have generally been limited in scope and nature, and substantial skepticism and questions remain regarding the feasibility of generating polypeptides having complex functions using a restricted set of amino acid types. See, e.g., Riddle et al., Nat. Struct. Biol. (1997), 4(10):805-809; Shang et al., Proc. Natl. Acad. Sci. USA (1994), 91:8373-8377; Heinz et al., Proc. Natl. Acad. Sci. USA (1992), 89:3751-3755; Regan & Degrado, Science (1988), 241:976-978; Kamteker et al., Science (1993), 262:1680-1685; Wang & Wang, Nat. Struct. Biol. (1999), 6(11): 1033-1038; Xiong et al., Proc. Natl. Acad. Sci. USA (1995), 92:6349-6353; Heinz et al., Proc. Natl. Acad. Sci. USA (1992), 89:3751-3755; Cannata et al., Bioinformatics (2002), 18(8):1102-1108; Davidson et al., Nat. Struct. Biol. (1995), 2(10):856-863; Murphy et al., Prot. Eng. (2000), 13(3):149-152; Brown & Sauer, Proc. Natl. Acad. Sci. USA (1999), 96:1983-1988; Akanuma et al., Proc. Natl. Acad. Sci. (2002), 99(21):13549-13553; Chan, Nat. Struct. Biol. (1999), 6(11):994-996.

[0012] Thus, there remains a need to improve methods of generating libraries that comprise functional polypeptides having a sufficient degree of sequence diversity, yet are sufficiently amenable for further manipulations directed at further diversification, high yield expression, etc. The invention described herein meets this need and provides other benefits.

### DISCLOSURE OF THE INVENTION

[0013] The present invention provides simplified and flexible methods of generating polypeptides comprising variant CDRs that comprise sequences with restricted diversity yet retain target antigen binding capability. Unlike conventional methods that are based on the proposition that adequate diversity of target binders can be generated only if a particular CDR(s), or all CDRs are diversified, and unlike conventional notions that adequate diversity is dependent upon the broadest range of amino acid substitutions (generally by substitution using all or most of the 20 amino acids), the invention provides methods capable of generating high quality target binders that are not necessarily dependent upon diversifying a particular CDR(s) or a particular number of CDRs of a reference polypeptide or source antibody. The invention is based, at least in part, on the surprising and unexpected finding that highly diverse libraries of high quality comprising functional polypeptides capable of binding target antigens can be generated by diversifying a minimal number of amino acid positions with a highly restricted number of amino acid residues. Methods of the invention are rapid, convenient and flexible, based on using restricted codon sets that encode a low number of amino acids. The restricted sequence diversity, and thus generally smaller size of the populations (e.g., libraries) of polypeptides generated by methods of the invention allows for further diversification of these populations, where necessary or desired. This is an advantage generally not provided by conventional methods. Candidate binder polypeptides generated by the invention possess high-quality target binding characteristics and have structural characteristics that provide for high yield of production in cell culture. The invention provides methods for generating these binder polypeptides, methods for using these polypeptides, and compositions comprising the same.

[0014] In one aspect, the invention provides fusion polypeptides comprising diversified CDR(s) and a heterologous polypeptide sequence (in certain embodiments, that of at least a portion of a viral polypeptide), as single polypeptides and as a member of a plurality of unique individual polypeptides that are candidate binders to targets of interest. Compositions (such as libraries) comprising such polypeptides find use in a variety of applications, for example, as pools of candidate immunoglobulin polypeptides (for example, antibodies and antibody fragments) that bind to targets of interest. Such polypeptides may also be generated using non-immunoglobulin scaffolds (for example, proteins, such as human growth hormone, etc.). The invention encompasses various aspects, including polynucleotides and polypeptides generated according to methods of the invention, and systems, kits and articles of manufacture for practicing methods of the invention, and/or using polypeptides/polynucleotides and/or compositions of the invention.

[0015] In one aspect, the invention provides a method of generating a polypeptide comprising at least one, two, three, four, five or all variant CDRs selected from the group consisting of H1, H2, H3, L1, L2 and L3, wherein said polypeptide is capable of binding a target antigen of interest, said method comprising identifying at least one (or any number up to all) solvent accessible and highly diverse amino acid position in a reference CDR corresponding to the variant CDR; and (ii) varying the amino acid at the solvent accessible and high diverse position by generating variant copies of the CDR using a restricted codon set (the definition of “restricted codon set” as provided below).

[0016] Various aspects and embodiments of methods of the invention are useful for generating and/or using a pool comprising a plurality of polypeptides of the invention, in particular for selecting and identifying candidate binders to target antigens of interest. For example, the invention provides a method of generating a composition comprising a plurality of polypeptides, each polypeptide comprising at least one, two, three, four, five or all variant CDRs selected from the group consisting of H1, H2, H3, L1, L2 and L3, wherein said polypeptide is capable of binding a target antigen of interest, said method comprising identifying at least one (or any number up to all) solvent accessible and highly diverse amino acid position in a reference CDR corresponding to the variant CDR; and (ii) varying the amino acid at the solvent accessible and high diverse position by generating variant copies of the CDR using a restricted codon set; wherein a plurality of polypeptides are generated by amplifying a template polynucleotide with a set of oligonucleotides comprising highly restricted degeneracy in the sequence encoding a variant amino acid, wherein said restricted degeneracy reflects the limited number of codon sequences of the restricted codon set.

[0017] In another example, the invention provides a method comprising: constructing an expression vector comprising a polynucleotide sequence which encodes a light chain, a heavy chain, or both the light chain and the heavy chain variable domains of a source antibody comprising at least one, two, three, four, five or all CDRs selected from the group consisting of CDR L1, L2, L3, H1, H2 and H3; and mutating at least one, two, three, four, five or all CDRs of the source antibody at at least one (or any number up to all) solvent accessible and highly diverse amino acid position using a restricted codon set.

[0018] In another example, the invention provides a method comprising: constructing a library of phage or phagemid particles displaying a plurality of polypeptides of the invention; contacting the library of particles with a target antigen under conditions suitable for binding of the particles to the target antigen; and separating the particles that bind from those that do not bind to the target antigen.

[0019] In any of the methods of the invention described herein, a solvent accessible and/or highly diverse amino acid position can be any that meet the criteria as described herein, in particular any combination of the positions as described herein, for example any combination of the positions described for the polypeptides of the invention (as described in greater detail herein). Suitable variant amino acids can be any that meet the criteria as described herein, for example variant amino acids in polypeptides of the invention as described in greater detail below.

[0020] Designing diversity in CDRs may involve designing diversity in the length and/or in sequence of the CDR. For example, CDRH3 may be diversified in length to be, e.g., 7 to 21 amino acids in length, and/or in its sequence, for example by varying highly diverse and/or solvent accessible positions with amino acids encoded by a restricted codon set. In some embodiments, a portion of CDRH3 has a length ranging from 5 to 21, 7 to 20, 9 to 15, or 11 to 13 amino acids, and has a variant amino acid at one or more positions encoded by a restricted codon set that encodes a limited number of amino acids such as codon sets encoding no more than 19, 15, 10, 8, 6, 4 or 2 amino acids. In some embodiments, the C terminal end has an amino acid sequence AM or AMDY.

[0021] In some embodiments, polypeptides of the invention can be in a variety of forms as long as the target binding function of the polypeptides is retained. In some embodiments, a polypeptide of the invention is a fusion polypeptide (i.e. a fusion of two or more sequences from heterologous polypeptides). Polypeptides with diversified CDRs according to the invention can be prepared as fusion polypeptides to at least a portion of a viral coat protein, for example, for use in phage display. Viral coat proteins that can be used for display of the polypeptides of the invention comprise protein p III, major coat protein pVIII, Soc (T4 phage), Hoc (T4 phage), gpD (lambda phage), pVI, or variants or fragments thereof. In some embodiments, the fusion polypeptide is fused to at least a portion of a viral coat protein, such as a viral coat protein selected from the group consisting of pIII, pVIII, Soc, Hoc, gpD, pVI, and variants or fragments thereof.

[0022] In some embodiments, in which the polypeptide with diversified CDRs is one or more antibody variable domains, the antibody variable domains can be displayed on the surface of the virus in a variety of formats including ScFv, Fab, ScFv₂, F(ab′)₂ and F(ab)₂. For display of the polypeptides in bivalent manner, the fusion protein in certain embodiments includes a dimerization domain. The dimerization domain can comprise a dimerization sequence and/or a sequence comprising one or more cysteine residues. The dimerization domain can be linked, directly or indirectly, to the C-terminal end of a heavy chain variable or constant domain (e.g., CH1). The structure of the dimerization domain can be varied depending on whether the antibody variable domain is produced as a fusion protein component with the viral coat protein component (e.g., without an amber stop codon after dimerization domain) or whether the antibody variable domain is produced predominantly without the viral coat protein component (e.g., with an amber stop codon after dimerization domain). When the antibody variable domain is produced predominantly as a fusion protein with the viral coat protein component, one or more disulfide bonds and/or a single dimerization sequence provides for bivalent display. For antibody variable domains predominantly produced without being fused to a viral coat protein component (e.g. with an amber stop codon), the dimerization domain can comprise both a cysteine residue and a dimerization sequence.

[0023] In addition, optionally, a fusion polypeptide can comprise a tag that may be useful in purification, detection and/or screening such as FLAG, poly-his, gD tag, c-myc, fluorescence protein or B-galactosidase. In one embodiment, a fusion polypeptide comprises a light chain variable or constant domain fused to a polypeptide tag.

[0024] In another aspect of the invention, a polypeptide such as an antibody variable domain is obtained from a single source or template molecule. The source or template molecule can be selected or designed for characteristics such as good yield and stability when produced in prokaryotic or eukaryotic cell culture, and/or to accommodate CDRH3 regions of varying lengths. The sequence of the template molecule can be altered to improve folding and/or display of the variable domain when presented as a fusion protein with a phage coat protein component. For example, a source antibody may comprise the amino acid sequence of the variable domains of humanized antibody 4D5 (light chain variable domain (FIG. 1; SEQ ID NO: 1)); (heavy chain variable domain (FIG. 1; SEQ ID NO: 2)). For example, in an antibody variable domain of a heavy or light chain, framework region residues can be modified or altered from the source or template molecule to improve folding, yield, display or affinity of the antibody variable domain. In some embodiments, framework residues are selected to be modified from the source or template molecule when the amino acid in the framework position of the source molecule is different from the amino acid or amino acids commonly found at that position in naturally occurring antibodies or in a subgroup consensus sequence. The amino acids at those positions can be changed to the amino acids most commonly found in the naturally occurring antibodies or in a subgroup consensus sequence at that position. In one embodiment, framework residue 71 of the heavy chain may be R, V or A. In another example, framework residue 93 of the heavy chain may be S or A. In yet another example, framework residue 94 may be R, K or T or encoded by MRT. In another example, framework residue 93 is A and framework residue 94 is R. In yet another example, framework residue 49 in the heavy chain may be alanine or glycine. Framework residues in the light chain may also be changed. For example, the amino acid at position 66 may be arginine or glycine. Framework regions for the wild-type humanized antibody 4D5-8 light chain and heavy chain sequences are shown in FIG. 16 (SEQ ID NOS: 1099-1102 and 1103-1106, respectively). Framework regions for variant versions of the humanized antibody 4D5-8 light chain and heavy chain sequences wherein the light chain is modified at position 66 and the heavy chain is modified at positions 71, 73, and 78 are shown in FIG. 17 (SEQ ID NOS: 1107-1110 and 1111-1114).

[0025] Methods of the invention are capable of generating a large variety of polypeptides comprising a diverse set of CDR sequences.

[0026] Immunoglobulin heavy chain variable domains randomized to provide diversity are provided. In one embodiment, a polypeptide comprising an immunoglobulin heavy chain variable domain is provided, wherein:
[0027] (i) CDRH1 comprises an amino acid sequence G-F-N-X1-X2-X3-X4-X5-X6-H (SEQ ID NO: 2629), wherein G is position 26 and X1 is position 29 according to the Kabat numbering system; wherein X1 is selected from F, L, I, and V; wherein X2 is selected from Y and S; wherein X3 is selected from Y and S; wherein X4 is selected from Y and S; wherein X5 is selected from Y and S, and wherein X6 is selected from M and I;
[0028] (ii) CDRH2 comprises an amino acid sequence: X1-I-X2-X3-X4-X5-X6-X7-T-X8-Y-A-D-S-V-K-G (SEQ ID NO: 2630), wherein X1 is position 50 according to the Kabat numbering system; wherein X1 is selected from Y and S; wherein X2 is selected from Y and S; wherein X3 is selected from P and S; wherein X4 is selected from Y and S; wherein X5 is selected from Y and S; wherein X6 is selected from G and S; wherein X7 is selected from Y and S; and wherein X8 is selected from Y and S; and
[0029] (iii) CDRH3 comprises an amino acid sequence: X1-X2-X3-X4-X5-X6-X7-X8-X9-X10-X11-X12-X13-X14-X15-X16-X17-X18-X19-D-Y (SEQ ID NO: 2631), wherein X1 is position 95 according to the Kabat numbering system, and wherein X1 is selected from Y and S; X2 is selected from Y and S; X3 is selected from Y and S, X4 is selected from Y and S; X5 is selected from Y and S; X6 is selected from Y and S; X7 is selected from Y and S or is not present; X8 is selected from Y and S or is not present; X9 is selected from Y and S or is not present; X10 is selected from Y and S or is not present; X11 is selected from Y and S or is not present; X12 is selected from Y and S or is not present; X13 is selected from Y and S or is not present; X14 is selected from Y and S or is not present; X15 is selected from Y and S or is not present; X16 is selected from Y and S or is not present; X17 is selected from Y and S or is not present; X18 is selected from G and A; and X19 is selected from F, L, I, and M.
   In one aspect, CDRH1 comprises an amino acid sequence selected from SEQ ID NOs: 52-66. In one aspect, CDRH2 comprises an amino acid sequence selected from SEQ ID NOs: 67-81. In one aspect, CDRH3 comprises an amino acid sequence selected from SEQ ID NOs: 82-96.

[0030] In another embodiment, a polypeptide comprising an immunoglobulin heavy chain variable domain is provided, wherein:
[0031] (i) CDRH1 comprises an amino acid sequence G-F-N-X1-X2-X3-X4-X5-X6-H (SEQ ID NO: 2629), wherein G is position 26 and X1 is position 29 according to the Kabat numbering system; wherein X1 is selected from F, L, I, and V; wherein X2 is selected from Y and S; wherein X3 is selected from Y and S; wherein X4 is selected from Y and S; wherein X5 is selected from Y and S, and wherein X6 is selected from M and I;
[0032] (ii) CDRH2 comprises an amino acid sequence: X1-I-X2-X3-X4-X5-X6-X7-T-X8-Y-A-D-S-V-K-G (SEQ ID NO: 2630), wherein X1 is position 50 according to the Kabat numbering system; wherein X1 is selected from Y and S; wherein X2 is selected from Y and S; wherein X3 is selected from P and S; wherein X4 is selected from Y and S; wherein X5 is selected from Y and S; wherein X6 is selected from G and S; wherein X7 is selected from Y and S; and wherein X8 is selected from Y and S; and
[0033] (iii) CDRH3 comprises an amino acid sequence: X1-X2-X3-X4-X5-X6-X7-X8-X9-X10-X11-X12-X13-X14-X15-X16-X17-X18-X19-D-Y (SEQ ID NO: 2632), wherein X1 is position 95 according to the Kabat numbering system, and wherein the amino acids at each of positions X1-X6 are selected from a pool of amino acids in a molar ratio of 20% Y, 15% S, 15% G, 3.125% A, 3.125% D, 3.125% E, 3.125% F, 3.125% H, 3.125% I, 3.125% K, 3.125% L, 3.125% M, 3.125% N, 3.125% P, 3.125% Q, 3.125% R, 3.125% T, 3.125% V, and 3.125% W; wherein the amino acids at each of positions X7-X17 are selected from a pool of amino acids in a molar ratio of 20% Y, 15% S, 15% G, 3.125% A, 3.125% D, 3.125% E, 3.125% F, 3.125% H, 3.125% I, 3.125% K, 3.125% L, 3.125% M, 3.125% N, 3.125% P, 3.125% Q, 3.125% R, 3.125% T, 3.125% V, and 3.125% W, or are not present;

[0034] wherein X18 is selected from G and A; and wherein X19 is selected from F, L, I, and M.

[0035] In one aspect, CDRH1 comprises an amino acid sequence selected from SEQ ID NOs: 111-125. In one aspect, CDRH2 comprises an amino acid sequence selected from SEQ ID NOs: 126-141. In one aspect, CDRH3 comprises an amino acid sequence selected from SEQ ID NOs: 142 and 144-157.

[0036] In another embodiment, a polypeptide comprising an immunoglobulin heavy chain variable domain is provided, wherein:
[0037] (i) CDRH1 comprises an amino acid sequence G-F-N-X1-X2-X3-X4-X5-X6-H (SEQ ID NO: 2629), wherein G is position 26 and X1 is position 29 according to the Kabat numbering system; wherein X1 is selected from F, L, I, and V; wherein X2 is selected from Y and S; wherein X3 is selected from Y and S; wherein X4 is selected from Y and S; wherein X5 is selected from Y and S; and wherein X6 is selected from M and I;
[0038] (ii) CDRH2 comprises an amino acid sequence: X1-I-X2-X3-X4-X5-X6-X7-T-X8-Y-A-D-S-V-K-G (SEQ ID NO: 2930), wherein X1 is position 50 according to the Kabat numbering system; wherein X1 is selected from Y and S; wherein X2 is selected from Y and S; wherein X3 is selected from P and S; wherein X4 is selected from Y and S; wherein X5 is selected from Y and S; wherein X6 is selected from G and S; wherein X7 is selected from Y and S; and wherein X8 is selected from Y and S; and
[0039] (iii) CDRH3 comprises an amino acid sequence: X1-X2-X3-X4-X5-X6-X7-D-Y (SEQ ID NO: 2633), wherein X1 is position 95 according to the Kabat numbering system, and wherein the amino acids at each of positions X1-X5 are selected from a pool of amino acids in a molar ratio of 20% Y, 15% S, 15% G, 3.125% A, 3.125% D, 3.125% E, 3.125% F, 3.125% H, 3.125% I, 3.125% K, 3.125% L, 3.125% M, 3.125% N, 3.125% P, 3.125% Q, 3.125% R, 3.125% T, 3.125% V, and 3.125% W; wherein X6 is selected from G and A; and
[0040] wherein X7 is selected from F, L, I and M.
   In one aspect, CDRH3 comprises the amino acid sequence of SEQ ID NO: 143.

[0041] In another embodiment, a polypeptide comprising an immunoglobulin heavy chain variable domain is provided, wherein:
[0042] (i) CDRH1 comprises an amino acid sequence G-F-X1-I-X2-X3-X4-X5-I-H (SEQ ID NO: 2634), wherein G is position 26 and X1 is position 28 according to the Kabat numbering system; wherein X1 is selected from Y and S; wherein X2 is selected from Y and S; wherein X3 is selected from Y and S; wherein X4 is selected from Y and S; and wherein X5 is selected from Y and S;
[0043] (ii) CDRH2 comprises an amino acid sequence: X1-I-X2-P-X3-X4-G-X5-T-X6-Y-A-D-S-V-K-G (SEQ ID NO: 2635), wherein X1 is position 50 according to the Kabat numbering system; wherein X1 is selected from Y and S; wherein X2 is selected from Y and S; wherein X3 is selected from Y and S; wherein X4 is selected from Y and S; wherein X5 is selected from Y and S; and wherein X6 is selected from Y and S; and
[0044] (iii) CDRH3 comprises an amino acid sequence: X1-X2-X3-X4-X5-X6-X7-X8-X9-X10-X11-X12-X13-X14-X15-X16-X17-X18-X19-D-Y (SEQ ID NO: 2636), wherein X1 is position 95 according to the Kabat numbering system, and wherein the amino acids at each of positions X1-X6 are selected from a pool of amino acids in a molar ratio of 50% Y, 25% S, 25% G; wherein the amino acids at each of positions X7-X17 are selected from a pool of amino acids in a molar ratio of 50% Y, 25% S, and 25% G, or are not present; wherein X18 is selected from G and A; and wherein X19 is selected from I, M, L, and F.

[0045] In another embodiment, a polypeptide comprising an immunoglobulin heavy chain variable domain is provided, wherein:
[0046] (i) CDRH1 comprises an amino acid sequence G-F-X1-I-X2-X3-X4-X5-I-H (SEQ ID NO: 2634), wherein G is position 26 and X1 is position 28 according to the Kabat numbering system; wherein X1 is selected from Y and S; wherein X2 is selected from Y and S; wherein X3 is selected from Y and S; wherein X4 is selected from Y and S; and wherein X5 is selected from Y and S;
[0047] (ii) CDRH2 comprises an amino acid sequence: X1-I-X2-P-X3-X4-G-X5-T-X6-Y-A-D-S-V-K-G (SEQ ID NO: 2635), wherein X1 is position 50 according to the Kabat numbering system; wherein X1 is selected from Y and S; wherein X2 is selected from Y and S; wherein X3 is selected from Y and S; wherein X4 is selected from Y and S; wherein X5 is selected from Y and S; and wherein X6 is selected from Y and S; and
[0048] (iii) CDRH3 comprises an amino acid sequence: X1-X2-X3-X4-X5-X6-X7-X8-X9-X10-X11-X12-X13-X14-X15-X16-X17-X18-X19-D-Y (SEQ ID NO: 2637), wherein X1 is position 95 according to the Kabat numbering system, and wherein the amino acids at each of positions X1-X6 are selected from a pool of amino acids in a molar ratio of 25% Y, 50% S, and 25% R; wherein the amino acids at each of positions X7-X17 are selected from a pool of amino acids in a molar ratio of 25% Y, 50% S, and 25% R, or are not present; wherein X18 is selected from G and A; and wherein X19 is selected from I, M, L, and F.

[0049] In another embodiment, a polypeptide comprising an immunoglobulin heavy chain variable domain is provided, wherein:
[0050] (i) CDRH1 comprises an amino acid sequence G-F-X1-I-X2-X3-X4-X5-I-H (SEQ ID NO: 2634), wherein G is position 26 and X1 is position 28 according to the Kabat numbering system; wherein X1 is selected from Y and S; wherein X2 is selected from Y and S; wherein X3 is selected from Y and S; wherein X4 is selected from Y and S; and wherein X5 is selected from Y and S;
[0051] (ii) CDRH2 comprises an amino acid sequence: X1-I-X2-P-X3-X4-G-X5-T-X6-Y-A-D-S-V-K-G (SEQ ID NO: 2635), wherein X1 is position 50 according to the Kabat numbering system; wherein X1 is selected from Y and S; wherein X2 is selected from Y and S; wherein X3 is selected from Y and S; wherein X4 is selected from Y and S; wherein X5 is selected from Y and S; and wherein X6 is selected from Y and S; and
[0052] (iii) CDRH3 comprises an amino acid sequence: X1-X2-X3-X4-X5-X6-X7-X8-X9-X10-X11-X12-X13-X14-X15-X16-X17-X18-X19-D-Y (SEQ ID NO: 2638), wherein X1 is position 95 according to the Kabat numbering system, and wherein the amino acids at each of positions X1-X6 are selected from a pool of amino acids in a molar ratio of 38% Y, 25% S, 25% G, and 12% R; wherein the amino acids at each of positions X7-X17 are selected from a pool of amino acids in a molar ratio of 38% Y, 25% S, 25% G, and 12% R, or are not present; wherein X18 is selected from G and A; and wherein X19 is selected from I, M, L, and F.

[0053] In another embodiment, a polypeptide comprising an immunoglobulin heavy chain variable domain, wherein:
[0054] (i) CDRH1 comprises an amino acid sequence G-F-X1-I-X2-X3-X4-X5-I-H (SEQ ID NO: 2634), wherein G is position 26 and X1 is position 28 according to the Kabat numbering system; wherein X1 is selected from Y and S; wherein X2 is selected from Y and S; wherein X3 is selected from Y and S; wherein X4 is selected from Y and S; and wherein X5 is selected from Y and S;
[0055] (ii) CDRH2 comprises an amino acid sequence: X1-I-X2-P-X3-X4-G-X5-T-X6-Y-A-D-S-V-K-G (SEQ ID NO: 2635), wherein X1 is position 50 according to the Kabat numbering system; wherein X1 is selected from Y and S; wherein X2 is selected from Y and S; wherein X3 is selected from Y and S; wherein X4 is selected from Y and S; wherein X5 is selected from Y and S; and wherein X6 is selected from Y and S; and
[0056] (iii) CDRH3 comprises an amino acid sequence: X1-X2-X3-X4-X5-X6-X7-X8-X9-X10-X11-X12-X13-X14-X15-X16-X17-X18-X19-D-Y (SEQ ID NO: 2639), wherein X1 is position 95 according to the Kabat numbering system, and wherein the amino acids at each of positions X1-X6 are selected from a pool of amino acids in a molar ratio of 20% Y, 26% S, 26% G, 13% R, 1% A, 1% D, 1% E, 1% F, 1% H, 1% I, 1% K, 1% L, 1% M, 1% N, 1% P, 1% Q, 1% T, 1% V, and 1% W; wherein the amino acids at each of positions X7-X17 are selected from a pool of amino acids in a molar ratio of 20% Y, 26% S, 26% G, 13% R, 1% A, 1% D, 1% E, 1% F, 1% H, 1% I, 1% K, 1% L, 1% M, 1% N, 1% P, 1% Q, 1% T, 1% V, 1% W, or are not present; wherein X18 is selected from G and A; and wherein X19 is selected from I, M, L, and F.

[0057] In one aspect, CDRH1 comprises an amino acid sequence selected from SEQ ID NOS: 318-439 or any of CDRH1 sequences in FIGS. 14 and 15. In one aspect, CDRH2 comprises an amino acid sequence selected from SEQ ID NOS: 440-561 or any of CDRH2 sequences in FIGS. 14 and 15. In one aspect, CDRH3 comprises an amino acid sequence selected from SEQ ID NOS: 562-683 or any of CDRH3 sequences in FIGS. 14 and 15. In one aspect, CDRH1 comprises an amino acid sequence selected from SEQ ID NOS:784-888 or any of CDRH1 sequences in FIGS. 14 and 15. In one aspect, CDRH2 comprises an amino acid sequence selected from SEQ ID NOS:889-993 or any of CDRH2 sequences in FIGS. 14 and 15. In one aspect, CDRH3 comprises an amino acid sequence selected from SEQ ID NOS:994-1098 or any of CDRH3 sequences in FIGS. 14 and 15.

[0058] In another embodiment, a polypeptide comprising an immunoglobulin heavy chain variable domain is provided, wherein:
[0059] (i) CDRH1 comprises an amino acid sequence G-F-X1-I-X2-X3-X4-X5-I-H (SEQ ID NO: 2634), wherein G is position 26 and X1 is position 28 according to the Kabat numbering system; wherein X1 is selected from Y and S; wherein X2 is selected from Y and S; wherein X3 is selected from Y and S; wherein X4 is selected from Y and S; and wherein X5 is selected from Y and S;
[0060] (ii) CDRH2 comprises an amino acid sequence: X1-I-X2-P-X3-X4-S-X5-T-X6-Y-A-D-S-V-K-G (SEQ ID NO: 2635), wherein X1 is position 50 according to the Kabat numbering system; wherein X1 is selected from Y and S; wherein X2 is selected from Y and S; wherein X3 is selected from Y and S; wherein X4 is selected from Y and S; wherein X5 is selected from Y and S; and wherein X6 is selected from Y and S; and
[0061] (iii) CDRH3 comprises an amino acid sequence: X1-X2-X3-X4-X5-X6-X7-X8-X9-X10-X11-X12-X13-X14-X15-X16-X17-X18-X19 (SEQ ID NO: 2640), wherein X1 is position 95 according to the Kabat numbering system, and wherein the amino acids at each of positions X1-X19 are selected from S and one of A, C, F, G, I, L, N, P, R, T, W, or Y, or are not present; wherein X18 is selected from G and A; and wherein X19 is selected from F, L, I, and M.

[0062] In one aspect, CDRH1 comprises an amino acid sequence selected from SEQ ID NOS: 1340-1396, 1538-1564, 1653-1686, 1805-1854, and 1963-1970 or any of the CDRH1 sequences in FIGS. 21, 22, 23, 24 and 25. In another aspect, CDRH2 comprises an amino acid sequence selected from SEQ ID NOS: 1397-1453, 1565-1591, 1687-1720, 1855-1904, and 1971-1978 or any of the CDRH2 sequences in FIGS. 21, 22, 23, 24 and 25. In another aspect, CDRH3 comprises an amino acid sequence selected from SEQ ID NOS: 1454-1510, 1592-1618, 1721-1754, 1905-1954, and 1979-1986 or any of the CDRH3 sequences in FIGS. 21, 22, 23, 24 and 25.

[0063] In another embodiment, a polypeptide comprising an immunoglobulin heavy chain variable domain is provided, wherein:
[0064] (i) CDRH1 comprises an amino acid sequence G-F-X1-I-X2-X3-X4-X5-I-H (SEQ ID NO: 2641), wherein G is position 26 and X1 is position 28 according to the Kabat numbering system; wherein the amino acid at each of positions X1-X5 is selected from S and one of Y, W, R, or F;
[0065] (ii) CDRH2 comprises an amino acid sequence: X1-I-X2-P-X3-X4-S-X5-T-X6-Y-A-D-S-V-K-G (SEQ ID NO: 2642), wherein X1 is position 50 according to the Kabat numbering system; wherein the amino acid at each of positions X1-X6 is selected from S and one of Y, W, R, or F; and
[0066] (iii) CDRH3 comprises an amino acid sequence: X1-X2-X3-X4-X5-X6-X7-X8-X9-X10-X11-X12-X13-X14-X15-X16-X17-X18-X19 (SEQ ID NO: 2643), wherein X1 is position 95 according to the Kabat numbering system, and wherein the amino acids at each of positions X1-X19 are selected from S and one of Y, W, R, or F, or are not present; wherein X18 is selected from G and A; and wherein X19 is selected from F, L, I, and M.
   In one aspect, CDRH1 comprises an amino acid sequence selected from SEQ ID NOS: 2027-2057, 2147-2173, 2239-2249, 2300-2327, and 2395-2405 or any of the CDRH1 sequences in FIGS. 28, 29, 30, 31 and 32. In another aspect, CDRH2 comprises an amino acid sequence selected from SEQ ID NOS: 2058-2088, 2174-2200, 2250-2260, 2328-2355, and 2406-2416 or any of the CDRH2 sequences in FIGS. 28, 29, 30, 31 and 32. In another aspect, CDRH3 comprises an amino acid sequence selected from SEQ ID NOS: 2089-2119, 2201-2227, 2261-2271, 2356-2383, and 2417-2427 or any of the CDRH3 sequences in FIGS. 28, 29, 30, 31 and 32.

[0067] In another embodiment, a polypeptide comprising an immunoglobulin heavy chain variable domain is provided, wherein:
[0068] (i) CDRH1 comprises an amino acid sequence G-F-N-X1-X2-X3-X4-X5-X6-H (SEQ ID NO: 2644), wherein G is position 26 and X1 is position 29 according to the Kabat numbering system; and wherein X1-X6 are naturally occurring amino acids other than cysteine;
[0069] (ii) CDRH2 comprises an amino acid sequence: X6-I-X7-X8-X9-X10-X11-X12-T-X13-Y-A-D-S-V-K-G (SEQ ID NO: 2645), wherein X6 is position 50 according to the Kabat numbering system, and wherein X6-X13 are naturally occurring amino acids other than cysteine; and
[0070] (iii) CDRH3 comprises an amino acid sequence: X14-X15-X16-X17-X18-(X19)ₙ-X20-X21-D-Y (SEQ ID NO: 2646), wherein X14 is position 95 according to the Kabat numbering system, and wherein n is a suitable number that would retain the functional activity of the heavy chain variable domain, and wherein X14-X21 are naturally occurring amino acids other than cysteine.
   In one aspect, n is 1 to 12. In one aspect, X1 is selected from F, L, I, and V; X2 is selected from Y and S; X3 is selected from Y and S; X4 is selected from Y and S; X5 is selected from Y and S, and X6 is selected from M and I. In one aspect, X6 is selected from Y and S; X7 is selected from Y and S; X8 is selected from P and S; X9 is selected from Y and S; X10 is selected from Y and S; X11 is selected from G and S; X12 is selected from Y and S; and X13 is selected from Y and S. In one aspect, X14 is selected from Y and S; X15 is selected from Y and S; X16 is selected from Y and S, X17 is selected from Y and S; X18 is selected from Y and S; X19 is selected from Y and S; X20 is selected from G and A; and X21 is selected from F, L, I, and M. In an alternative aspect, the amino acids at each of positions X14-X19 are selected from a pool of amino acids in a molar ratio of 20% Y, 15% S, 15% G, 3.125% A, 3.125% D, 3.125% E, 3.125% F, 3.125% H, 3.125% I, 3.125% K, 3.125% L, 3.125% M, 3.125% N, 3.125% P, 3.125% Q, 3.125% R, 3.125% T, 3.125% V, and 3.125% W; X20 is selected from G and A; and X21 is selected from F, L, I, and M. In one aspect, CDRH1 comprises an amino acid sequence selected from SEQ ID NOs: 52-66 and 111-125. In one aspect, CDRH2 comprises an amino acid sequence selected from SEQ ID NOs: 67-81 and 126-141. In one aspect, CDRH3 comprises an amino acid sequence selected from SEQ ID NOs: 82-96 and 142-157.

[0071] In another embodiment, a polypeptide comprising an immunoglobulin heavy chain variable domain is provided, wherein:
[0072] (i) CDRH1 comprises an amino acid sequence G-F-X1-I-X2-X3-X4-X5-I-H (SEQ ID NO: 2647), wherein G is position 26 and X1 is position 28 according to the Kabat numbering system; and wherein X1-X5 are naturally occurring amino acids other than cysteine;
[0073] (ii) CDRH2 comprises an amino acid sequence: X6-I-X7-P-X8-X9-G-X10-T-X11-Y-A-D-S-V-K-G (SEQ ID NO: 2648), wherein X6 is position 50 according to the Kabat numbering system, and wherein X6-X11 are naturally occurring amino acids other than cysteine; and
[0074] (iii) CDRH3 comprises an amino acid sequence: X12-X13-X14-X15-X16-(X17)ₙ-X18-X19-D-Y (SEQ ID NO: 2649), wherein X12 is position 95 according to the Kabat numbering system, and wherein n is a suitable number that would retain the functional activity of the heavy chain variable domain, and wherein X12-X19 are naturally occurring amino acids other than cysteine.

[0075] In one aspect, n is 1 to 12. In one aspect, X1 is selected from Y and S; X2 is selected from Y and S; X3 is selected from Y and S; X4 is selected from Y and S; X5 is selected from Y and S, and X6 is selected from Y and S. In one aspect, X6 is selected from Y and S; X7 is selected from Y and S; X8 is selected from Y and S; X9 is selected from Y and S; X10 is selected from Y and S; and X11 is selected from Y and S. In one aspect, the amino acids at each of positions X12-X17 are selected from a pool of amino acids in a molar ratio of 50% Y, 25% S, and 25% G, X18 is selected from G and A, and X19 is selected from I, M, L, and F. In an alternative aspect, the amino acids at each of positions X12-X17 are selected from a pool of amino acids in a molar ratio of 25% Y, 50% S, and 25% R, X18 is selected from G and A, and X19 is selected from I, M, L, and F. In another alternative aspect, the amino acids at each of positions X12-X17 are selected from a pool of amino acids in a molar ratio of 38% Y, 25% S, 25% G, and 12% R, X18 is selected from G and A, and X19 is selected from I, M, L, and F. In another alternative aspect, the amino acids at each of positions X12-X17 are selected from a pool of amino acids in a molar ratio of 20% Y, 26% S, 26% G, 13% R, 1% A, 1% D, 1% E, 1% F, 1% H, 1% I, 1% K, 1% L, 1% M, 1% N, 1% P, 1% Q, 1% T, 1% V, and 1% W, X18 is selected from G and A, and X19 is selected from I, M, L, and F. In one aspect, CDRH1 comprises an amino acid sequence selected from SEQ ID NOS: 318-439 or 734-888 or any of the CDRH1 sequences in FIGS. 14 or 15. In one aspect, CDRH2 comprises an amino acid sequence selected from SEQ ID NOS: 440-561 or 989-993 or any of the CDRH2 sequences in FIGS. 14 or 15. In one aspect, CDRH3 comprises an amino acid sequence selected from SEQ ID NOS: 562-683 or 994-1098 or any of the CDRH3 sequences in FIGS. 14 or 15.

[0076] In another embodiment, a polypeptide comprising an immunoglobulin heavy chain variable domain is provided, wherein:
[0077] (i) CDRH1 comprises an amino acid sequence G-F-X1-I-X2-X3-X4-X5-I-H (SEQ ID NO: 2647), wherein G is position 26 and X1 is position 28 according to the Kabat numbering system; and wherein X1-X5 are naturally occurring amino acids other than cysteine;
[0078] (ii) CDRH2 comprises an amino acid sequence: X6-I-X7-P-X8-X9-S-X10-T-X11-Y-A-D-S-V-K-G (SEQ ID NO: 2650), wherein X6 is position 50 according to the Kabat numbering system, and wherein X6-X11 are naturally occurring amino acids other than cysteine; and
[0079] (iii) CDRH3 comprises an amino acid sequence: X12-X13-X14-(X15)ₙ-X16-X17 (SEQ ID NO: 2651), wherein X14 is position 95 according to the Kabat numbering system, and wherein n is a suitable number that would retain the functional activity of the heavy chain variable domain, and wherein X12-X17 are naturally occurring amino acids other than cysteine.

[0080] In one aspect, n is 1 to 14. In another aspect, X1 is selected from Y and S; X2 is selected from Y and S; X3 is selected from Y and S; X4 is selected from Y and S; and X5 is selected from Y and S. In another aspect, X1 is selected from W and S; X2 is selected from W and S; X3 is selected from W and S; X4 is selected from W and S; and X5 is selected from W and S. In another aspect, X1 is selected from R and S; X2 is selected from R and S; X3 is selected from R and S; X4 is selected from R and S; and X5 is selected from R and S. In another aspect, X1 is selected from F and S; X2 is selected from F and S; X3 is selected from F and S; X4 is selected from F and S; and X5 is selected from F and S. In another aspect, X6 is selected from Y and S; X7 is selected from Y and S; X8 is selected from Y and S; X9 is selected from Y and S; X10 is selected from Y and S; and X11 is selected from Y and S. In another aspect, X6 is selected from W and S; X7 is selected from W and S; X8 is selected from W and S; X9 is selected from W and S; X10 is selected from W and S; and X11 is selected from W and S. In another aspect, X6 is selected from R and S; X7 is selected from R and S; X8 is selected from R and S; X9 is selected from R and S; X10 is selected from R and S; and X11 is selected from R and S. In another aspect, X6 is selected from F and S; X7 is selected from F and S; X8 is selected from F and S; X9 is selected from F and S; X10 is selected from F and S; and X11 is selected from F and S. In another aspect, X12 is selected from Y and S; X13 is selected from Y and S; X14 is selected from Y and S; X15 is selected from Y and S; X16 is selected from G and A; and X17 is selected from F, L, I, and M. In another aspect, X12 is selected from W and S; X13 is selected from W and S; X14 is selected from W and S; X15 is selected from W and S; X16 is selected from G and A; and X17 is selected from F, L, I, and M. In another aspect, X12 is selected from R and S; X13 is selected from R and S; X14 is selected from R and S; X15 is selected from R and S; X16 is selected from G and A; and X17 is selected from F, L, I, and M. In another aspect, X12 is selected from F and S; wherein X13 is selected from F and S; X14 is selected from F and S; X15 is selected from F and S; X16 is selected from G and A; and X17 is selected from F, L, I, and M.

[0081] In another aspect, the amino acids at each of positions X12-X15 are selected from S and one of A, C, F, G, I, L, N, P, R, T, W, and Y; X16 is selected from G and A; and X17 is selected from F, L, I, and M.

[0082] In another aspect, CDRH1 comprises an amino acid sequence selected from SEQ ID NOs: 1340-1396, 1538-1564, 1653-1686, 1805-1854, 1963-1970, 2027-2057, 2147-2173, 2239-2249, 2300-2327, and 2395-2405 or any of the CDRH1 sequences in any of FIGS. 21-25. In another aspect, CDRH2 comprises an amino acid sequence selected from SEQ ID NOs: 1397-1453, 1565-1591, 1687-1720, 1855-1904, 1971-1978, 2058-2088, 2174-2200, 2250-2260, 2328-2355, and 2406-2416 or any of the CDRH2 sequences in any of FIGS. 21-25. In another aspect, CDRH3 comprises an amino acid sequence selected from SEQ ID NOs: 1454-1510, 1592-1618, 1721-1754, 1905-1954, 1979-1986, 2089-2119, 2201-2227, 2261-2271, 2356-2383, and 2417-2427 or any of the CDRH3 sequences in FIGS. 21-25.

[0083] Immunoglobulin light chain variable domains randomized to provide diversity are also provided. In one embodiment, a polypeptide comprising an immunoglobulin light chain variable domain is provided, wherein CDRL3 comprises an amino acid sequence: Q-Q-X1-X2-X3-X4-X5-X6-X7-X8-T (SEQ ID NO: 2652), wherein X1 is position 91 according to the Kabat numbering system, wherein X1 is selected from Y and S; wherein X2 is selected from Y and S; wherein X3 is selected from Y and S; wherein X4 is selected from Y and S; wherein X5 is selected from Y and S, or is not present; wherein X6 is selected from Y and S, or is not present; wherein X7 is selected from P and L; and wherein X8 is selected from F, L, I, and V. In one aspect, CDRL3 comprises an amino acid sequence selected from SEQ ID NOs: 37-51 and 97-110.

[0084] In another embodiment, a polypeptide comprising an immunoglobulin light chain variable domain is provided, wherein CDRL3 comprises an amino acid sequence: Q-Q-X1-X2-X3-X4-P-X5-T (SEQ ID NO: 2653), wherein X1 is position 91 according to the Kabat numbering system, wherein X1 is selected from Y and S, wherein X2 is selected from Y and S; wherein X3 is selected from Y and S; wherein X4 is selected from Y and S; and wherein X5 is selected from Y and S. In one aspect, CDRL3 comprises an amino acid sequence selected from SEQ ID NOs: 209-317, 684-783, 1283-1339, 1511-1537, 1619-1652, 1755-1804, 1955-1962 or any of the CDRL3 sequences in FIGS. 14, 15 or 21-25.

[0085] In another embodiment, a polypeptide comprising an immunoglobulin light chain variable domain is provided, wherein CDRL3 comprises an amino acid sequence: Q-Q-X1-X2-X3-X4-P-X5-T (SEQ ID NO: 2654), wherein X1 is position 91 according to the Kabat numbering system, and wherein the amino acids at each of positions X1-X5 are selected from S and one of Y, W, R, or F. In one aspect, CDRL3 comprises an amino acid sequence selected from SEQ ID NOs: 1996-2026, 2120-2146, 2228-2238, 2272-2299, and 2384-2394 or any of the CDRL3 sequences in FIGS. 28-32.

[0086] In another embodiment, a polypeptide comprising an immunoglobulin light chain variable domain is provided, wherein:
[0087] (i) CDRL1 comprises a first consensus hypervariable sequence or variant thereof comprising substitution at one or more positions compared to a corresponding consensus hypervariable sequence;
[0088] (ii) CDRL2 comprises a second consensus hypervariable sequence or variant thereof comprising substitution at one or more positions compared to a corresponding consensus hypervariable sequence; and
[0089] (iii) CDRL3 comprises an amino acid sequence: Q-Q-X1-X2-X3-(X4)ₙ-X5-X6-T (SEQ ID NO: 2655), wherein X1-X6 are any naturally occurring amino acids other than cysteine, and wherein X1 is position 91 according to the Kabat numbering system.
   In one aspect, X1 is position 91 according to the Kabat numbering system, X1 is selected from Y and S; X2 is selected from Y and S; X3 is selected from Y and S; X4 is selected from Y and S; X5 is selected from P and L; and X6 is selected from F, L, I, and V. In one aspect, n is 1 to 3. In one aspect, CDRL3 comprises an amino acid sequence selected from SEQ ID NOs: 37-51 and 97-110. In one aspect, the first consensus hypervariable sequence is R-A-S-Q-D-V-N-T-A-V-A (SEQ ID NO: 6). In one aspect, the second consensus hypervariable sequence is S-A-S-S-L-Y-S (SEQ ID NO: 7).

[0090] In another embodiment, a polypeptide comprising an immunoglobulin light chain variable domain is provided, wherein:
[0091] (i) CDRL1 comprises a first consensus hypervariable sequence or variant thereof comprising substitution at one or more positions compared to a corresponding consensus hypervariable sequence;
[0092] (ii) CDRL2 comprises a second consensus hypervariable sequence or variant thereof comprising substitution at one or more positions compared to a corresponding consensus hypervariable sequence; and
[0093] (iii) CDRL3 comprises an amino acid sequence: Q-Q-X1-X2-X3-X4-P-X5-T (SEQ ID NO: 2656), wherein X1-X5 are any naturally occurring amino acids other than cysteine, and X1 is position 91 according to the Kabat numbering system.
   In one aspect, X1 is position 91 according to the Kabat numbering system, X1 is selected from Y and S, X2 is selected from Y and S; X3 is selected from Y and S; X4 is selected from Y and S; and X5 is selected from Y and S. In another aspect, X1 is position 91 according to the Kabat numbering system, and the amino acids at each of positions X1-X5 are selected from S and one of Y, W, R, and F. In one aspect, CDRL3 comprises an amino acid sequence selected from SEQ ID NOs: 209-317, 684-783, 1283-1339, 1511-1537, 1619-1652, 1755-1804, 1955-1962, 1996-2026, 2120-2146, 2228-2238, 2272-2299, and 2384-2394 or any of the CDRL3 sequences in any of FIGS. 14, 15 or 21-25. In another aspect, the first consensus hypervariable sequence is R-A-S-Q-D-V-N-T-A-V-A (SEQ ID NO: 6). In another aspect, the second consensus hypervariable sequence is S-A-S-S-L-Y-S (SEQ ID NO: 7).

[0094] In certain embodiments, a polypeptide comprising at least two antibody variable domains comprising: (a) a heavy chain antibody variable domain comprising any of the above-recited heavy chain polypeptides, and (b) a light chain antibody variable domain comprising any of the above-recited light chain polypeptides is provided.

[0095] In certain embodiments, an antibody comprising a polypeptide comprising an immunoglobulin heavy chain variable domain according to any of the above-recited heavy chain polypeptides, and a polypeptide comprising an immunoglobulin light chain variable domain according to any of the above-recited light chain polypeptides is provided.

[0096] In certain aspects, the above-recited polypeptides and antibodies further comprise a dimerization domain linked to the C-terminal region of a heavy chain antibody variable domain. In certain such aspects, the dimerization domain comprises a leucine zipper domain or a sequence comprising at least one cysteine residue. In certain such aspects, the dimerization domain comprises a hinge region from an antibody and a leucine zipper. In certain other aspects, the dimerization domain is a single cysteine.

[0097] In one embodiment, a fusion polypeptide comprising any of the above-recited polypeptides is provided, wherein an antibody variable domain comprising the above-recited polypeptide is fused to at least a portion of a viral coat protein. In one aspect, the viral coat protein is selected from the group consisting of protein pIII, major coat protein pVIII, Soc, Hoc, gpD, pv1, and variants thereof. In one aspect, the fusion polypeptide further comprises a dimerization domain between the variable domain and the viral coat protein. In one such aspect, the variable domain is a heavy chain variable domain. In another aspect, the fusion polypeptide further comprises a variable domain fused to a peptide tag. In one such aspect, the variable domain is a light chain variable domain. In another such aspect, the peptide tag is selected from the group consisting of gD, c-myc, poly-his, a fluorescence protein, and β-galactosidase.

[0098] In one embodiment, one or more of the above-described polypeptides further comprise framework regions FR1, FR2, FR3, and/or FR4 for an antibody variable domain corresponding to the variant CDRH1, CDRH2, CDRH3, and/or CDRL3, wherein the framework regions are obtained from a single antibody template. In certain such embodiments, each of the framework regions comprises an amino acid sequence corresponding to the framework region amino acid sequences of antibody 4D5 (SEQ ID NOS: 1099-1102 and 1103-1106) or a variant of antibody 4D5 (SEQ ID NOS: 1107-1110 and 1111-1114).

[0099] In one embodiment, a library is provided that comprises a plurality of one or more of the above-described polypeptides, wherein the library has at least 1×10⁴ distinct antibody variable domain sequences.

[0100] In one embodiment, a method of generating a composition comprising a plurality of polypeptides is provided, comprising:
[0101] (a) generating a plurality of polypeptides comprising:
   [0102] (i) CDRH1 comprising an amino acid sequence G-F-N-X1-X2-X3-X4-X5-X6-H (SEQ ID NO: 2629), wherein G is position 26 and X1 is position 29 according to the Kabat numbering system; wherein X1 is selected from F, L, I, and V; wherein X2 is selected from Y and S; wherein X3 is selected from Y and S; wherein X4 is selected from Y and S; wherein X5 is selected from Y and S, and wherein X6 is selected from M and I;
   [0103] (ii) CDRH2 comprising an amino acid sequence: X1-I-X2-X3-X4-X5-X6-X7-T-X8-Y-A-D-S-V-K-G (SEQ ID NO: 2630), wherein X1 is position 50 according to the Kabat numbering system; wherein X1 is selected from Y and S; wherein X2 is selected from Y and S; wherein X3 is selected from P and S; wherein X4 is selected from Y and S; wherein X5 is selected from Y and S; wherein X6 is selected from G and S; wherein X7 is selected from Y and S; and wherein X8 is selected from Y and S; and
   [0104] (iii) CDRH3 comprising an amino acid sequence: X1-X2-X3-X4-X5-X6-X7-X8-X9-X10-X11-X12-X13-X14-X15-X16-X17-X18-X19-D-Y (SEQ ID NO: 2631), wherein X1 is position 95 according to the Kabat numbering system, and wherein X1 is selected from Y and S; X2 is selected from Y and S; X3 is selected from Y and S, X4 is selected from Y and S; X5 is selected from Y and S; X6 is selected from Y and S; X7 is selected from Y and S or is not present; X8 is selected from Y and S or is not present; X9 is selected from Y and S or is not present; X10 is selected from Y and S or is not present; X11 is selected from Y and S or is not present; X12 is selected from Y and S or is not present; X13 is selected from Y and S or is not present; X14 is selected from Y and S or is not present; X15 is selected from Y and S or is not present; X16 is selected from Y and S or is not present; X17 is selected from Y and S or is not present; X18 is selected from G and A; and X19 is selected from F, L, I, and M.
      In one aspect, the method further comprises:
[0105] (b) generating a plurality of polypeptides comprising:
   [0106] (i) CDRL1 comprising a first consensus hypervariable sequence or variant thereof comprising substitution at one or more positions compared to a corresponding consensus hypervariable sequence;
   [0107] (ii) CDRL2 comprising a second consensus hypervariable sequence or variant thereof comprising substitution at one or more positions compared to a corresponding consensus hypervariable sequence; and
   [0108] (iii) CDRL3 comprising an amino acid sequence: Q-Q-X1-X2-X3-X4-X5-X6-X7-X8-T (SEQ ID NO: 2652), wherein X1 is position 91 according to the Kabat numbering system; an wherein X1 is position 91 according to the Kabat numbering system, wherein X1 is selected from Y and S; wherein X2 is selected from Y and S; wherein X3 is selected from Y and S; wherein X4 is selected from Y and S; wherein X5 is selected from Y and S, or is not present; wherein X6 is selected from Y and S, or is not present; wherein X7 is selected from P and L; and wherein X8 is selected from F, L, I, and V.
      In one aspect, the first consensus hypervariable sequence comprises a Kabat consensus CDRL1 sequence. In one such aspect, the first consensus hypervariable sequence is R-A-S-Q-D-V-N-T-A-V-A (SEQ ID NO: 6). In one aspect, the second consensus hypervariable sequence comprises a Kabat consensus CDRL2 sequence. In one such aspect, the second consensus hypervariable sequence is S-A-S-S-L-Y-S (SEQ ID NO: 7). In one aspect, the plurality of polypeptides are encoded by a plurality of polynucleotides.

[0109] In another embodiment, a method of generating a composition comprising a plurality of polypeptides is provided, comprising:
[0110] (a) generating a plurality of polypeptides comprising:
   [0111] (i) CDRH1 comprising an amino acid sequence G-F-N-X1-X2-X3-X4-X5-X6-H (SEQ ID NO: 2629), wherein G is position 26 and X1 is position 29 according to the Kabat numbering system; wherein X1 is selected from F, L, I, and V; wherein X2 is selected from Y and S; wherein X3 is selected from Y and S; wherein X4 is selected from Y and S; wherein X5 is selected from Y and S, and wherein X6 is selected from M and I;
   [0112] (ii) CDRH2 comprising an amino acid sequence: X1-I-X2-X3-X4-X5-X6-X7-T-X8-Y-A-D-S-V-K-G (SEQ ID NO: 2630), wherein X1 is position 50 according to the Kabat numbering system; wherein X1 is selected from Y and S; wherein X2 is selected from Y and S; wherein X3 is selected from P and S; wherein X4 is selected from Y and S; wherein X5 is selected from Y and S; wherein X6 is selected from G and S; wherein X7 is selected from Y and S; and wherein X8 is selected from Y and S; and
   [0113] (iii) CDRH3 comprising an amino acid sequence: X1-X2-X3-X4-X5-X6-X7-X8-X9-X10-X11-X12-X13-X14-X15-X16-X17-X18-X19-D-Y (SEQ ID NO: 2632), wherein X1 is position 95 according to the Kabat numbering system, and wherein the amino acids at each of positions X1-X6 are selected from a pool of amino acids in a molar ratio of 20% Y, 15% S, 15% G, 3.125% A, 3.125% D, 3.125% E, 3.125% F, 3.125% H, 3.125% I, 3.125% K, 3.125% L, 3.125% M, 3.125% N, 3.125% P, 3.125% Q, 3.125% R, 3.125% T, 3.125% V, and 3.125% W; wherein the amino acids at each of positions X7-X17 are selected from a pool of amino acids in a molar ratio of 20% Y, 15% S, 15% G, 3.125% A, 3.125% D, 3.125% E, 3.125% F, 3.125% H, 3.125% I, 3.125% K, 3.125% L, 3.125% M, 3.125% N, 3.125% P, 3.125% Q, 3.125% R, 3.125% T, 3.125% V, and 3.125% W, or are not present, wherein X18 is selected from G and A; and wherein X19 is selected from F, L, I and M.
      In one aspect, the method further comprises:
[0114] (b) generating a plurality of polypeptides comprising:
   [0115] (i) CDRL1 comprising a first consensus hypervariable sequence or variant thereof comprising substitution at one or more positions compared to a corresponding consensus hypervariable sequence;
   [0116] (ii) CDRL2 comprising a second consensus hypervariable sequence or variant thereof comprising substitution at one or more positions compared to a corresponding consensus hypervariable sequence; and
   [0117] (iii) CDRL3 comprising an amino acid sequence: Q-Q-X1-X2-X3-X4-X5-X6-X7-X8-T (SEQ ID NO: 2652), wherein X1 is position 91 according to the Kabat numbering system; an wherein X1 is position 91 according to the Kabat numbering system, wherein X1 is selected from Y and S; wherein X2 is selected from Y and S; wherein X3 is selected from Y and S; wherein X4 is selected from Y and S; wherein X5 is selected from Y and S, or is not present; wherein X6 is selected from Y and S, or is not present; wherein X7 is selected from P and L; and wherein X8 is selected from F, L, I, and V.
      In one aspect, the plurality of polypeptides are encoded by a plurality of polynucleotides.

[0118] In another embodiment, a method of generating a composition comprising a plurality of polypeptides is provided, comprising:
[0119] (a) generating a plurality of polypeptides comprising:
   [0120] (i) CDRH1 comprises an amino acid sequence G-F-X1-I-X2-X3-X4-X5-I-H (SEQ ID NO: 2634), wherein G is position 26 and X1 is position 28 according to the Kabat numbering system; wherein X1 is selected from Y and S; wherein X2 is selected from Y and S; wherein X3 is selected from Y and S; wherein X4 is selected from Y and S; and wherein X5 is selected from Y and S;
   [0121] (ii) CDRH2 comprises an amino acid sequence: X1-I-X2-P-X3-X4-G-X5-T-X6-Y-A-D-S-V-K-G (SEQ ID NO: 2635), wherein X1 is position 50 according to the Kabat numbering system; wherein X1 is selected from Y and S; wherein X2 is selected from Y and S; wherein X3 is selected from Y and S; wherein X4 is selected from Y and S; wherein X5 is selected from Y and S; and wherein X6 is selected from Y and S; and
   [0122] (iii) CDRH3 comprises an amino acid sequence: X1-X2-X3-X4-X5-X6-X7-X8-X9-X10-X11-X12-X13-X14-X15-X16-X17-X18-X19-D-Y (SEQ ID NO: 2636), wherein X1 is position 95 according to the Kabat numbering system, and wherein the amino acids at each of positions X1-X6 are selected from a pool of amino acids in a molar ratio of 50% Y, 25% S, and 25% G; wherein the amino acids at each of positions X7-X17 are selected from a pool of amino acids in a molar ratio of 50% Y, 25% S, and 25% G, or are not present; wherein X18 is selected from G and A; and

[0123] wherein X19 is selected from I, M, L, and F.

In one aspect, the method further comprises:

[0124] (b) generating a plurality of polypeptides comprising:
   [0125] (i) CDRL1 comprising a first consensus hypervariable sequence or variant thereof comprising substitution at one or more positions compared to a corresponding consensus hypervariable sequence;
   [0126] (ii) CDRL2 comprising a second consensus hypervariable sequence or variant thereof comprising substitution at one or more positions compared to a corresponding consensus hypervariable sequence; and
   [0127] (iii) CDRL3 comprising an amino acid sequence: Q-Q-X1-X2-X3-X4-P-X5-T (SEQ ID NO: 2653), wherein X1 is position 91 according to the Kabat numbering system, and wherein X1 is selected from Y and S, wherein X2 is selected from Y and S; wherein X3 is selected from Y and S; wherein X4 is selected from Y and S; and
   [0128] wherein X5 is selected from Y and S.
      In one aspect, the plurality of polypeptides are encoded by a plurality of polynucleotides.

[0129] In another embodiment, a method of generating a composition comprising a plurality of polypeptides is provided, comprising:
[0130] (a) generating a plurality of polypeptides comprising:
   [0131] (i) CDRH1 comprising an amino acid sequence G-F-X1-I-X2-X3-X4-X5-I-H (SEQ ID NO: 2634), wherein G is position 26 and X1 is position 28 according to the Kabat numbering system; wherein X1 is selected from Y and S; wherein X2 is selected from Y and S; wherein X3 is selected from Y and S; wherein X4 is selected from Y and S; and wherein X5 is selected from Y and S;
   [0132] (ii) CDRH2 comprising an amino acid sequence: X1-I-X2-P-X3-X4-G-X5-T-X6-Y-A-D-S-V-K-G (SEQ ID NO: 2635), wherein X1 is position 50 according to the Kabat numbering system; wherein X1 is selected from Y and S; wherein X2 is selected from Y and S; wherein X3 is selected from Y and S; wherein X4 is selected from Y and S; wherein X5 is selected from Y and S; and wherein X6 is selected from Y and S; and
   [0133] (iii) CDRH3 comprising an amino acid sequence: X1-X2-X3-X4-X5-X6-X7-X8-X9-X10-X11-X12-X13-X14-X15-X16-X17-X18-X19-D-Y (SEQ ID NO: 2637), wherein X1 is position 95 according to the Kabat numbering system, and wherein the amino acids at each of positions X1-X6 are selected from a pool of amino acids in a molar ratio of 25% Y, 50% S, and 25% R; wherein the amino acids at each of positions X7-X17 are selected from a pool of amino acids in a molar ratio of 25% Y, 50% S, and 25% R; wherein X18 is selected from G and A; and wherein X19 is selected from I, M, L, and F.
      In one aspect, the method further comprises:
[0134] (b) generating a plurality of polypeptides comprising:
   [0135] (i) CDRL1 comprising a first consensus hypervariable sequence or variant thereof comprising substitution at one or more positions compared to a corresponding consensus hypervariable sequence;
   [0136] (ii) CDRL2 comprising a second consensus hypervariable sequence or variant thereof comprising substitution at one or more positions compared to a corresponding consensus hypervariable sequence; and
   [0137] (iii) CDRL3 comprising an amino acid sequence: Q-Q-X1-X2-X3-X4-P-X5-T (SEQ ID NO: 2653), wherein X1 is position 91 according to the Kabat numbering system, and wherein X1 is selected from Y and S, wherein X2 is selected from Y and S; wherein X3 is selected from Y and S; wherein X4 is selected from Y and S; and
   [0138] wherein X5 is selected from Y and S.
      In one aspect, the plurality of polypeptides are encoded by a plurality of polynucleotides.

[0139] In another embodiment, a method of generating a composition comprising a plurality of polypeptides is provided, comprising:
[0140] (a) generating a plurality of polypeptides comprising:
   [0141] (i) CDRH1 comprising an amino acid sequence G-F-X1-I-X2-X3-X4-X5-I-H (SEQ ID NO: 2634), wherein G is position 26 and X1 is position 28 according to the Kabat numbering system; wherein X1 is selected from Y and S; wherein X2 is selected from Y and S; wherein X3 is selected from Y and S; wherein X4 is selected from Y and S; and wherein X5 is selected from Y and S;
   [0142] (ii) CDRH2 comprising an amino acid sequence: X1-I-X2-P-X3-X4-G-X5-T-X6-Y-A-D-S-V-K-G (SEQ ID NO: 2635), wherein X1 is position 50 according to the Kabat numbering system; wherein X1 is selected from Y and S; wherein X2 is selected from Y and S; wherein X3 is selected from Y and S; wherein X4 is selected from Y and S; wherein X5 is selected from Y and S; and wherein X6 is selected from Y and S; and
   [0143] (iii) CDRH3 comprising an amino acid sequence: X1-X2-X3-X4-X5-X6-X7-X8-X9-X10-X11-X12-X13-X14-X15-X16-X17-X18-X19-D-Y (SEQ ID NO: 2638), wherein X1 is position 95 according to the Kabat numbering system, and wherein the amino acids at each of positions X1-X6 are selected from a pool of amino acids in a molar ratio of 38% Y, 25% S, 25% G, and 12% R; wherein the amino acids at each of positions X7-X17 are selected from a pool of amino acids in a molar ratio of 38% Y, 25% S, 25% G, and 12% R, or are not present; wherein X18 is selected from G and A; and wherein X19 is selected from I, M, L, and F.
      In one aspect, the method further comprises:
[0144] (b) generating a plurality of polypeptides comprising:
   [0145] (i) CDRL1 comprising a first consensus hypervariable sequence or variant thereof comprising substitution at one or more positions compared to a corresponding consensus hypervariable sequence;
   [0146] (ii) CDRL2 comprising a second consensus hypervariable sequence or variant thereof comprising substitution at one or more positions compared to a corresponding consensus hypervariable sequence; and
   [0147] (iii) CDRL3 comprising an amino acid sequence: Q-Q-X1-X2-X3-X4-P-X5-T (SEQ ID NO: 2653), wherein X1 is position 91 according to the Kabat numbering system, and wherein X1 is selected from Y and S, wherein X2 is selected from Y and S; wherein X3 is selected from Y and S; wherein X4 is selected from Y and S; and
   [0148] wherein X5 is selected from Y and S.
      In one aspect, the plurality of polypeptides are encoded by a plurality of polynucleotides.

[0149] In another embodiment, a method of generating a composition comprising a plurality of polypeptides is provided, comprising:
[0150] (a) generating a plurality of polypeptides comprising:
   [0151] (i) CDRH1 comprising an amino acid sequence G-F-X1-I-X2-X3-X4-X5-I-H (SEQ ID NO: 2634), wherein G is position 26 and X1 is position 28 according to the Kabat numbering system; wherein X1 is selected from Y and S; wherein X2 is selected from Y and S; wherein X3 is selected from Y and S; wherein X4 is selected from Y and S; and wherein X5 is selected from Y and S;
   [0152] (ii) CDRH2 comprising an amino acid sequence: X1-I-X2-P-X3-X4-G-X5-T-X6-Y-A-D-S-V-K-G (SEQ ID NO: 2635), wherein Xl is position 50 according to the Kabat numbering system; wherein X1 is selected from Y and S; wherein X2 is selected from Y and S; wherein X3 is selected from Y and S; wherein X4 is selected from Y and S; wherein X5 is selected from Y and S; and wherein X6 is selected from Y and S; and
   [0153] (iii) CDRH3 comprising an amino acid sequence: X1-X2-X3-X4-X5-X6-X7-X8-X9-X10-X11-X12-X13-X14-X15-X16-X17-X18-X19-D-Y (SEQ ID NO: 2639), wherein X1 is position 95 according to the Kabat numbering system, and wherein the amino acids at each of positions X1-X6 are selected from a pool of amino acids in a molar ratio of 20% Y, 26% S, 26% G, 13% R, 1% A, 1% D, 1% E, 1% F, 1% H, 1% I, 1% K, 1% L, 1% M, 1% N, 1% P, 1% Q, 1% T, 1% V, and 1% W; wherein the amino acids at each of positions X7-X17 are selected from a pool of amino acids in a molar ratio of 20% Y, 26% S, 26% G, 13% R, 1% A, 1% D, 1% E, 1% F, 1% H, 1% I, 1% K, 1% L, 1% M, 1% N, 1% P, 1% Q, 1% T, 1% V, and 1% W, or are not present; wherein X18 is selected from G and A; and wherein X19 is selected from I, M, L, and F.
      In one aspect, the method further comprises:
[0154] (b) generating a plurality of polypeptides comprising:
   [0155] (i) CDRL1 comprising a first consensus hypervariable sequence or variant thereof comprising substitution at one or more positions compared to a corresponding consensus hypervariable sequence;
   [0156] (ii) CDRL2 comprising a second consensus hypervariable sequence or variant thereof comprising substitution at one or more positions compared to a corresponding consensus hypervariable sequence; and
   [0157] (iii) CDRL3 comprising an amino acid sequence: Q-Q-X1-X2-X3-X4-P-X5-T (SEQ ID NO: 2653), wherein X1 is position 91 according to the Kabat numbering system, and wherein X1 is selected from Y and S, wherein X2 is selected from Y and S; wherein X3 is selected from Y and S; wherein X4 is selected from Y and S; and
   [0158] wherein X5 is selected from Y and S.
      In one aspect, the first consensus hypervariable sequence comprises a Kabat consensus CDRLl sequence. In one such aspect, the first consensus hypervariable sequence is R-A-S-Q-D-V-N-T-A-V-A (SEQ ID NO: 6). In one aspect, the second consensus hypervariable sequence comprises a Kabat consensus CDRL2 sequence. In one such aspect, the second consensus hypervariable sequence is S-A-S-S-L-Y-S (SEQ ID NO: 7). In one aspect, the plurality of polypeptides are encoded by a plurality of polynucleotides.

[0159] In one embodiment, a method of generating a composition comprising a plurality of polypeptides is provided, comprising:
[0160] (a) generating a plurality of polypeptides comprising:
   [0161] (i) CDRH1 comprising an amino acid sequence G-F-X1-I-X2-X3-X4-X5-I-H (SEQ ID NO: 2634), wherein G is position 26 and X1 is position 28 according to the Kabat numbering system; wherein X1 is selected from Y and S; wherein X2 is selected from Y and S; wherein X3 is selected from Y and S; wherein X4 is selected from Y and S; and wherein X5 is selected from Y and S;
   [0162] (ii) CDRH2 comprising an amino acid sequence: X1-I-X2-P-X3-X4-S-X5-T-X6-Y-A-D-S-V-K-G (SEQ ID NO: 2657), wherein X1 is position 50 according to the Kabat numbering system; wherein X1 is selected from Y and S; wherein X2 is selected from Y and S; wherein X3 is selected from Y and S; wherein X4 is selected from Y and S; wherein X5 is selected from Y and S; and wherein X6 is selected from Y and S; and
   [0163] (iii) CDRH3 comprising an amino acid sequence: X1-X2-X3-X4-X5-X6-X7-X8-X9-X10-X11-X12-X13-X14-X15-X16-X17-X18-X19 (SEQ ID NO: 2640), where X1 is position 95 according to the Kabat numbering system, and wherein the amino acids at each of positions X1-X19 are selected from S and one of A, C, F, G, I, L, N, P, R, T, W, or Y, or are not present; wherein X18 is selected from G and A; and

[0164] wherein X19 is selected from F, L, I, and M.

In one aspect, the method further comprises:

[0165] (b) generating a plurality of polypeptides comprising:
   [0166] (i) CDRL1 comprising a first consensus hypervariable sequence or variant thereof comprising substitution at one or more positions compared to a corresponding consensus hypervariable sequence;
   [0167] (ii) CDRL2 comprising a second consensus hypervariable sequence or variant thereof comprising substitution at one or more positions compared to a corresponding consensus hypervariable sequence; and
   [0168] (iii) CDRL3 comprising an amino acid sequence: Q-Q-X1-X2-X3-X4-P-X5-T (SEQ ID NO: 2653), wherein X1 is position 91 according to the Kabat numbering system; wherein X1 is selected from Y and S; wherein X2 is selected from Y and S;
   [0169] wherein X3 is selected from Y and S; wherein X4 is selected from Y and S; and
   [0170] wherein X5 is selected from Y and S.

[0171] In one embodiment, a method of generating a composition comprising a plurality of polypeptides is provided, comprising:
[0172] (a) generating a plurality of polypeptides comprising:
   [0173] (i) CDRH1 comprises an amino acid sequence G-F-X1-I-X2-X3-X4-X5-I-H (SEQ ID NO: 2641), wherein G is position 26 and X1 is position 28 according to the Kabat numbering system; wherein the amino acid at each of positions X1-X5 is selected from S and one of Y, W, R, or F;
   [0174] (ii) CDRH2 comprises an amino acid sequence: X1-I-X2-P-X3-X4-S-X5-T-X6-Y-A-D-S-V-K-G (SEQ ID NO: 2642), wherein X1 is position 50 according to the Kabat numbering system; wherein the amino acid at each of positions X1-X6 is selected from S and one of Y, W, R, or F; and
   [0175] (iii) CDRH3 comprises an amino acid sequence: X1-X2-X3-X4-X5-X6-X7-X8-X9-X10-X11-X12-X13-X14-X15-X16-X17-X18-X19 (SEQ ID NO: 2643), wherein X1 is position 95 according to the Kabat numbering system, and wherein the amino acids at each of positions X1-X19 are selected from S and one of Y, W, R, or F, or are not present; wherein X18 is selected from G and A; and wherein X19 is selected from F, L, I, and M.
      In another aspect, the method further comprises:
[0176] (b) generating a plurality of polypeptides comprising:
   [0177] (i) CDRL1 comprising a first consensus hypervariable sequence or variant thereof comprising substitution at one or more positions compared to a corresponding consensus hypervariable sequence;
   [0178] (ii) CDRL2 comprising a second consensus hypervariable sequence or variant thereof comprising substitution at one or more positions compared to a corresponding consensus hypervariable sequence; and
   [0179] (iii) CDRL3 comprising an amino acid sequence: Q-Q-X1-X2-X3-X4-P-X5-T (SEQ ID NO: 2654), wherein X1 is position 91 according to the Kabat numbering system; and wherein the amino acids at each of positions X1-X5 are selected from S and one of Y, W, R, and F.

[0180] In one embodiment, a method of generating one or more of the above-described CDRH1, CDRH2, CDRH3, CDRL1, CDRL2, and CDRL3 sequences is provided, comprising:
[0181] (a) constructing an expression vector comprising a polynucleotide sequence which encodes a light chain variable domain, a heavy chain variable domain, or both of a source antibody comprising at least one, two, three, four, five or all CDRs of the source antibody selected from the group consisting of CDRL1, CDRL2, CDRL3, CDRH1, CDRH2, and CDRH3; and
[0182] (b) mutating at least one, two three, four, five or all CDRs of the source antibody to generate one or more of the above-described hypervariable regions.

[0183] In one embodiment, a method of selecting for a polypeptide that binds to a target antigen is provided, comprising:
[0184] (a) generating a composition with a plurality of one or more of the above-described polypeptides;
[0185] (b) selecting one or more polypeptides from the composition that binds to a target antigen;
[0186] (c) isolating the one or more polypeptides that bind to the target antigen from polypeptides that do not bind to the target antigen; and
[0187] (d) identifying the one or more polypeptides that bind to the target antigen that have a desired affinity for the target antigen.

[0188] In one embodiment, a method of selecting for an antigen binding variable domain that binds to a target antigen from a library of antibody variable domains is provided, comprising:
[0189] (a) contacting one or more of the above-described libraries with a target antigen;
[0190] (b) separating one or more polypeptides that specifically bind to the target antigen from polypeptides that do not specifically bind to the target antigen, recovering the one or more polypeptides that specifically bind to the target antigen, and incubating the one or more polypeptides that specifically bind to the target antigen in a series of solutions comprising decreasing amounts of the target antigen in a concentration from about 0.1 nM to about 1000 nM; and
[0191] (c) selecting the one or more polypeptides that specifically bind to the target antigen and that can bind to the lowest concentration of the target antigen or that have an affinity of about 0.1 nM to about 200 nM.
   In one aspect, the target antigen is VEGF, insulin, HER2, IGF-1, or HGH. In one aspect, the concentration of the target antigen is about 100 to about 250 nM. In one aspect, the concentration of target antigen is about 25 to about 100 nM. In some embodiments, one or more of the libraries, clones or polypeptides are screened against a panel of antigens including the target antigen. In some embodiments, those clones or polypeptides that specifically bind to the target antigen and do not substantially crossreact with any of the other antigen on the panel are selected. The panel of antigens can include at least three and up to 100 different antigens. In some cases, the panel of antigens includes 3 to 100, 3 to 50, 3 to 25, or 3 to 10 different antigens.

[0192] In one embodiment, a method of selecting for a polypeptide that binds to a target antigen from a library of polypeptides is provided, comprising:
[0193] (a) isolating one or more polypeptides that specifically bind to the target antigen by contacting a library comprising a plurality of any of the above-described polypeptides with an immobilized target antigen under conditions suitable for binding;
[0194] (b) separating the one or more polypeptides that specifically bind to the target antigen from polypeptides that do not specifically bind to the target antigen, and recovering the one or more polypeptides that specifically bind to the target antigen to obtain a subpopulation enriched for the one or more polypeptides that specifically bind to the target antigen; and
[0195] (c) optionally, repeating steps (a)-(b) at least twice, each repetition using the subpopulation enriched for the one or more polypeptides that specifically bind to the target antigen obtained from the previous round of selection.
   In one aspect, the method further comprises:
[0196] (d) incubating the subpopulation with a concentration of labeled target antigen in the range of about 0.1 nM to about 1000 nM to form a mixture, under conditions suitable for binding;
[0197] (e) contacting the mixture with an immobilized agent that binds to the label on the target antigen;
[0198] (f) detecting the one or more polypeptides that specifically bind to the labeled target antigen, and recovering the one or more polypeptides that specifically bind to the labeled target antigen from the labeled target antigen; and
[0199] (g) optionally, repeating steps (d) to (f) at least twice, each repetition using the subpopulation enriched for the one or more polypeptides that specifically bind to the labeled target antigen obtained from the previous round of selection, and using a lower concentration of labeled target antigen than the previous round of selection.
   In one aspect, the method further comprises adding an excess of unlabeled target antigen to the mixture and incubating the mixture for a period of time sufficient to recover one or more polypeptides that specifically bind to the target antigen with low affinity. In some embodiments, in any of the methods described herein, one or more of the libraries, clones or polypeptides are screened against a panel of antigens including the target antigen. In some embodiments, those clones or polypeptides that specifically bind to the target antigen and do not substantially crossreact with any of the other antigen on the panel are selected. The panel of antigens can include at least three and up to 100 different antigens. In some cases, the panel of antigens includes 3 to 100, 3 to 50, 3 to 25, or 3 to 10 different antigens.

[0200] In one embodiment, a method of isolating one or more polypeptides that specifically bind to a target antigen with high affinity is provided, comprising:
[0201] (a) contacting a library comprising a plurality of any of the above-described polypeptides with a target antigen at a concentration of at least about 0.1 nM to about 1000 nM to isolate one or more polypeptides that specifically bind to the target antigen;
[0202] (b) recovering the one or more polypeptides that specifically bind to the target antigen from the target antigen to obtain a subpopulation enriched for the one or more polypeptides that specifically bind to the target antigen; and
[0203] (c) optionally repeating steps (a) and (b) at least twice, each repetition using the subpopulation obtained from the previous round of selection and using a decreased concentration of target antigen from that used in the previous round to isolate one or more polypeptides that bind specifically to the target antigen at the lowest concentration of target antigen.

[0204] In one embodiment, an assay for selecting one or more polypeptides that bind to a target antigen from a library comprising a plurality of any of the above-described polypeptides is provided, comprising:
[0205] (a) contacting the library with a concentration of labeled target antigen at a concentration range of about 0.1 nM to about 1000 nM, under conditions suitable for formation of one or more complexes between the labeled target antigen and one or more polypeptides that specifically bind the target antigen;
[0206] (b) isolating the one or more complexes and separating the one or more polypeptides that specifically bind the target antigen from the labeled target antigen to obtain a subpopulation enriched for the one or more polypeptides that specifically bind the target antigen; and
[0207] (c) optionally, repeating steps (a) and (b) at least twice, each time using the subpopulation obtained from the previous round of selection and using a lower concentration of target antigen than was used in the previous round.
   In one aspect, the assay further comprises adding an excess of unlabeled target antigen to the one or more complexes. In one aspect, steps (a) and (b) are repeated twice, wherein the concentration of target antigen in the first round of selection is about 100 nM to about 250 nM, wherein the concentration of target antigen in the second round of selection is about 25 nM to about 100 nM, and wherein the concentration of target antigen in the third round of selection is about 0.1 nM to about 25 nM.

[0208] In one embodiment, a method of screening a library comprising a plurality of any of the above-described polypeptides is provided, comprising:
[0209] (a) incubating a first sample of the library with a target antigen under conditions suitable for binding of the polypeptides to the target antigen;
[0210] (b) incubating a second sample of the library in the absence of a target antigen;
[0211] (c) contacting each of the first sample and the second sample with immobilized target antigen under conditions suitable for binding of the polypeptide to the immobilized target antigen;
[0212] (d) detecting the polypeptide bound to immobilized target antigen for each sample; and
[0213] (e) determining the affinity of the polypeptide for the target antigen by calculating the ratio of the amounts of bound polypeptide from the first sample over the amount of bound polypeptide from the second sample.

[0214] In one embodiment, one or more of the above-described polypeptides specifically binds human VEGF. In one aspect, the polypeptide is an antibody that specifically binds human VEGF. In one such aspect, the antibody comprises the framework regions of the 4D5 antibody. In one such aspect, the antibody comprises the framework regions of a variant 4D5 antibody. In one such aspect, the antibody is a monoclonal antibody. In one such aspect, the antibody is a bispecific antibody. In one such aspect, the antibody is a synthetic antibody.

[0215] In one aspect, an antibody that specifically binds human VEGF comprises a CDRH1 amino acid sequence comprising at least one sequence selected from SEQ ID NOS: 52-66, 111-125, 318-439, 1340-1396, and 2027-2057 or at least one sequence in any of FIGS. 10, 14, 21 or 28. In one aspect, an antibody that specifically binds human VEGF comprises a CDRH2 amino acid sequence comprising at least one sequence selected from SEQ ID NOS: 67-81, 126-141, 440-561, 1397-1453, and 2058-2088 or at least one sequence in any of FIGS. 10, 14, 21 or 28. In one aspect, an antibody that specifically binds human VEGF comprises a CDRH3 amino acid sequence comprising at least one sequence selected from SEQ ID NOS: 82-96, 142-157, 562-683, 1454-1510, and 2089-2119 or at least one sequence in any of FIGS. 10, 14, 21 or 28. In one aspect, an antibody that specifically binds human VEGF comprises a CDRL3 amino acid sequence comprising at least one sequence selected from SEQ ID NOS: 37-51, 97-110, 209-317, 1283-1339, and 1996-2026 or at least one sequence in any of FIGS. 10, 14, 21 or 28. In one aspect, an antibody that specifically binds human VEGF comprises CDRH1, CDRH2, CDRH3, and CDRL3 sequences corresponding to the CDRH1, CDRH2, CDRH3, and CDRL3 sequences set forth in FIG. 10 for any one of Fabs 1-31. In one aspect, an antibody that specifically binds human VEGF comprises CDRH1, CDRH2, CDRH3, and CDRL3 sequences corresponding to the CDRH1, CDRH2, CDRH3, and CDRL3 sequences set forth in FIGS. 14A-C for any one of clones 1-122. In another aspect, an antibody that specifically binds human VEGF comprises CDRH1, CDRH2, CDRH3, and CDRL3 sequences corresponding to the CDRH1, CDRH2, CDRH3, and CDRL3 sequences set forth in FIGS. 21A-21B for any one of clones A1-A60. In another aspect, an antibody that specifically binds human VEGF comprises CDRH1, CDRH2, CDRH3, and CDRL3 sequences corresponding to the CDRH1, CDRH2, CDRH3, and CDRL3 sequences set forth in FIG. 28A for any one of clones F1-F148.

[0216] In one embodiment, an isolated polynucleotide encoding any of the above-described antibodies that specifically binds human VEGF is provided. In one embodiment, a vector comprising an isolated polynucleotide encoding any of the above-described antibodies that specifically binds human VEGF is provided. In one embodiment, a host cell transformed with a vector comprising an isolated polynucleotide encoding any of the above-described antibodies that specifically bind human VEGF is provided. In one embodiment, a process of producing an antibody is provided, comprising culturing a host cell transformed with a vector comprising an isolated polynucleotide encoding any of the above-described antibodies that specifically bind human VEGF such that the polynucleotide is expressed. In one aspect, the process further comprises recovering the antibody from the host cell culture. In one aspect, the process further comprises recovering the antibody from the host cell culture medium.

[0217] In one embodiment, a method of using one or more of the above-described antibodies that specifically bind human VEGF for treating a disorder associated with abnormal angiogenesis in a mammal in need of treatment thereof is provided, comprising the step of administering the one or more antibodies to the mammal. In one aspect, the disorder is cancer. In one such aspect, the cancer is selected from breast cancer, colorectal cancer, non-small cell lung cancer, non-Hodgkins lymphoma (NHL), renal cancer, prostate cancer, liver cancer, head and neck cancer, melanoma, ovarian cancer, mesothelioma, and multiple myeloma. In another aspect, the treatment further comprises the step of administering a second therapeutic agent simultaneously or sequentially with the antibody. In one such aspect, the second therapeutic agent is selected from an anti-angiogenic agent, an anti-neoplastic agent, a chemotherapeutic agent, and a cytotoxic agent. In one such aspect, the anti-angiogenic agent is an anti-hVEGF antibody capable of binding to the same VEGF epitope as the antibody A4.6.1.

[0218] In one embodiment, a method of treating a mammal suffering from or at risk of developing an inflammatory or immune disorder is provided, comprising the step of treating the mammal with one or more Fabs of one or more of the above-described antibodies that specifically bind human VEGF. In one aspect, the inflammatory or immune disorder is rheumatoid arthritis.

[0219] In one aspect, an antibody that specifically binds HER2 comprises a CDRH1 amino acid sequence comprising at least one sequence selected from SEQ ID NOS: 1538-1564 and 2147-2173. In one aspect, an antibody that specifically binds HER2 comprises a CDRH2 amino acid sequence comprising at least one sequence selected from SEQ ID NOS: 1565-1591 and 2174-2200 or at least one sequence selected from any of the sequences in FIG. 22 or FIG. 29. In one aspect, an antibody that specifically binds HER2 comprises a CDRH3 amino acid sequence comprising at least one sequence selected from SEQ ID NOS: 1592-1618 and 2201-2227 or at least one sequence selected from any of the sequences in FIG. 22 or FIG. 29. In one aspect, an antibody that specifically binds HER2 comprises a CDRL3 amino acid sequence comprising at least one sequence selected from SEQ ID NOS: 1511-1537 and 2120-2146 or at least one sequence selected from any of the sequences in FIG. 22 or FIG. 29. In one aspect, an antibody that specifically binds HER2 comprises CDRH1, CDRH2, CDRH3, and CDRL3 sequences corresponding to the CDRH1, CDRH2, CDRH3, and CDRL3 sequences set forth in FIG. 22A for any one of clones B1-B28. In one aspect, an antibody that specifically binds HER2 comprises CDRH1, CDRH2, CDRH3, and CDRL3 sequences corresponding to the CDRH1, CDRH2, CDRH3, and CDRL3 sequences set forth in FIG. 29A for any one of clones G29-G61.

[0220] In one embodiment, an isolated polynucleotide encoding any of the above-described antibodies that specifically binds HER2 is provided. In one embodiment, a vector comprising an isolated polynucleotide encoding any of the above-described antibodies that specifically binds HER2 is provided. In one embodiment, a host cell transformed with a vector comprising an isolated polynucleotide encoding any of the above-described antibodies that specifically bind HER2 is provided. In one embodiment, a process of producing an antibody is provided, comprising culturing a host cell transformed with a vector comprising an isolated polynucleotide encoding any of the above-described antibodies that specifically bind HER2 such that the polynucleotide is expressed. In one aspect, the process further comprises recovering the antibody from the host cell culture. In one aspect, the process further comprises recovering the antibody from the host cell culture medium.

[0221] In one embodiment, a method of using one or more of the above-described antibodies that specifically bind HER2 for treating a HER2-related disorder, comprising the step of administering the one or more antibodies to the mammal. In another aspect, the treatment further comprises the step of administering a second therapeutic agent simultaneously or sequentially with the antibody. In one such aspect, the second therapeutic agent is selected from an anti-angiogenic agent, an anti-neoplastic agent, a chemotherapeutic agent, and a cytotoxic agent.

[0222] In one embodiment, a method of treating a mammal suffering from or at risk of developing a HER2-related disorder, comprising the step of treating the mammal with one or more Fabs of one or more of the above-described antibodies that specifically bind HER2. In one embodiment, one or more of the above-described polypeptides specifically binds insulin. In one aspect, the polypeptide is an antibody that specifically binds insulin. In one such aspect, the antibody comprises the framework regions of the 4D5 antibody. In one such aspect, the antibody comprises the framework regions of a variant 4D5 antibody. In one such aspect, the antibody is a monoclonal antibody. In one such aspect, the antibody is a bispecific antibody. In one such aspect, the antibody is a synthetic antibody.

[0223] In one aspect, an antibody that specifically binds insulin comprises a CDRH1 amino acid sequence comprising at least one sequence selected from SEQ ID NOS: 784-888, 1653-1686, and 2239-2249 or at least one sequence selected from any of the CDRH1 sequences in FIGS. 15, 23 or 30. In one aspect, an antibody that specifically binds insulin comprises a CDRH2 amino acid sequence comprising at least one sequence selected from SEQ ID NOS: 889-993, 1687-1720, and 2250-2260 or at least one sequence selected from any of the CDRH2 sequences in FIGS. 15, 23 or 30. In one aspect, an antibody that specifically binds insulin comprises a CDRH3 amino acid sequence comprising at least one sequence selected from SEQ ID NOS: 994-1098, 1721-1754, and 2261-2271 or at least one sequence selected from any of the CDRH3 sequences in FIGS. 15, 23 or 30. In one aspect, an antibody that specifically binds insulin comprises a CDRL3 amino acid sequence comprising at least one sequence selected from SEQ ID NOS: 684-783, 1619-1652, and 2228-2238 or at least one sequence selected from any of the CDRL3 sequences in FIGS. 15, 23 or 30. In one aspect, an antibody that specifically binds insulin comprises CDRH1, CDRH2, CDRH3, and CDRL3 sequences corresponding to the CDRH1, CDRH2, CDRH3, and CDRL3 sequences set forth in FIGS. 15A-15B for any one of clones 1-105. In another aspect, an antibody that specifically binds insulin comprises CDRH1, CDRH2, CDRH3, and CDRL3 sequences corresponding to the CDRH1, CDRH2, CDRH3, and CDRL3 sequences set forth in FIG. 23A for any one of clones C1-C47. In another aspect, an antibody that specifically binds insulin comprises CDRH1, CDRH2, CDRH3, and CDRL3 sequences corresponding to the CDRH1, CDRH2, CDRH3, and CDRL3 sequences set forth in FIG. 30A for any one of clones H43-H65.

[0224] In one embodiment, an isolated polynucleotide encoding any of the above-described antibodies that specifically binds insulin is provided. In one embodiment, a vector comprising an isolated polynucleotide encoding any of the above-described antibodies that specifically binds insulin is provided. In one embodiment, a host cell transformed with a vector comprising an isolated polynucleotide encoding any of the above-described antibodies that specifically bind insulin is provided. In one embodiment, a process of producing an antibody is provided, comprising culturing a host cell transformed with a vector comprising an isolated polynucleotide encoding any of the above-described antibodies that specifically bind insulin such that the polynucleotide is expressed. In one aspect, the process further comprises recovering the antibody from the host cell culture. In one aspect, the process further comprises recovering the antibody from the host cell culture medium.

[0225] In one embodiment, a method of using one or more of the above-described antibodies that specifically bind insulin for treating an insulin-related disorder in a mammal in need of treatment thereof is provided, comprising the step of administering the one or more antibodies to the mammal. In one embodiment, a method of treating a mammal suffering from or at risk of developing an insulin-related disorder is provided, comprising the step of treating the mammal with one or more Fabs of one or more of the above-described antibodies that specifically bind insulin.

[0226] In one aspect, an antibody that specifically binds human IGF-1 comprises a CDRH1 amino acid sequence comprising at least one sequence selected from SEQ ID NOS: 1805-1854 and 2300-2327 or at least one CDRH1 sequence selected from sequences in FIGS. 24 or 31. In one aspect, an antibody that specifically binds human IGF-1 comprises a CDRH2 amino acid sequence comprising at least one sequence selected from SEQ ID NOS: 1855-1904 and 2328-2355 or at least one CDRH2 sequence selected from sequences in FIGS. 24 or 31. In one aspect, an antibody that specifically binds human IGF-1 comprises a CDRH3 amino acid sequence comprising at least one sequence selected from SEQ ID NOS: 1905-1954 and 2356-2383 or at least one CDRH3 sequence selected from sequences in FIGS. 24 or 31. In one aspect, an antibody that specifically binds human IGF-1 comprises a CDRL3 amino acid sequence comprising at least one sequence selected from SEQ ID NOS: 1755-1804 and 2272-2299 or at least one CDRL3 sequence selected from sequences in FIGS. 24 or 31. In one aspect, an antibody that specifically binds human IGF-1 comprises CDRH1, CDRH2, CDRH3, and CDRL3 sequences corresponding to the CDRH1, CDRH2, CDRH3, and CDRL3 sequences set forth in FIG. 24A for any one of clones D44-D159. In one aspect, an antibody that specifically binds human IGF-1 comprises CDRH1, CDRH2, CDRH3, and CDRL3 sequences corresponding to the CDRH1, CDRH2, CDRH3, and CDRL3 sequences set forth in FIG. 31 A for any one of clones I67-I161.

[0227] In one embodiment, an isolated polynucleotide encoding any of the above-described antibodies that specifically binds human IGF-1 is provided. In one embodiment, a vector comprising an isolated polynucleotide encoding any of the above-described antibodies that specifically binds human IGF-1 is provided. In one embodiment, a host cell transformed with a vector comprising an isolated polynucleotide encoding any of the above-described antibodies that specifically bind human IGF-1 is provided. In one embodiment, a process of producing an antibody is provided, comprising culturing a host cell transformed with a vector comprising an isolated polynucleotide encoding any of the above-described antibodies that specifically bind human IGF-1 such that the polynucleotide is expressed. In one aspect, the process further comprises recovering the antibody from the host cell culture. In one aspect, the process further comprises recovering the antibody from the host cell culture medium.

[0228] In one embodiment, a method of using one or more of the above-described antibodies that specifically bind human IGF-1 for treating an IGF-1-related disorder, comprising the step of administering the one or more antibodies to the mammal. In another aspect, the treatment further comprises the step of administering a second therapeutic agent simultaneously or sequentially with the antibody. In one such aspect, the second therapeutic agent is selected from an anti-angiogenic agent, an anti-neoplastic agent, a chemotherapeutic agent, and a cytotoxic agent.

[0229] In one embodiment, a method of treating a mammal suffering from or at risk of developing an IGF-1-related disorder is provided, comprising the step of treating the mammal with one or more Fabs of one or more of the above-described antibodies that specifically bind human IGF-1.

[0230] In one aspect, an antibody that specifically binds human growth hormone (HGH) comprises a CDRH1 amino acid sequence comprising at least one sequence selected from SEQ ID NOS: 1963-1970 and 2395-2405 or at least one sequence selected from any of the sequences in FIGS. 25 or 32. In one aspect, an antibody that specifically binds HGH comprises a CDRH2 amino acid sequence comprising at least one sequence selected from SEQ ID NOS: 1971-1978 and 2406-2416 or at least one sequence selected from any of the sequences in FIGS. 25 or 32. In one aspect, an antibody that specifically binds HGH comprises a CDRH3 amino acid sequence comprising at least one sequence selected from SEQ ID NOS: 1979-1986 and 2417-2427 or at least one sequence selected from any of the sequences in FIGS. 25 or 32. In one aspect, an antibody that specifically binds HGH comprises a CDRL3 amino acid sequence comprising at least one sequence selected from SEQ ID NOS: 1955-1962 and 2384-2394 or at least one sequence selected from any of the sequences in FIGS. 25 or 32. In one aspect, an antibody that specifically binds HGH comprises CDRH1, CDRH2, CDRH3, and CDRL3 sequences corresponding to the CDRH1, CDRH2, CDRH3, and CDRL3 sequences set forth in FIG. 25A for any one of clones E35-E43. In one aspect, an antibody that specifically binds HGH comprises CDRH1, CDRH2, CDRH3, and CDRL3 sequences corresponding to the CDRH1, CDRH2, CDRH3, and CDRL3 sequences set forth in FIG. 32A for any one of clones J56-J66.

[0231] In one embodiment, an isolated polynucleotide encoding any of the above-described antibodies that specifically binds HGH is provided. In one embodiment, a vector comprising an isolated polynucleotide encoding any of the above-described antibodies that specifically binds HGH is provided. In one embodiment, a host cell transformed with a vector comprising an isolated polynucleotide encoding any of the above-described antibodies that specifically bind HGH is provided. In one embodiment, a process of producing an antibody is provided, comprising culturing a host cell transformed with a vector comprising an isolated polynucleotide encoding any of the above-described antibodies that specifically bind HGH such that the polynucleotide is expressed. In one aspect, the process further comprises recovering the antibody from the host cell culture. In one aspect, the process further comprises recovering the antibody from the host cell culture medium.

[0232] In one embodiment, a method of using one or more of the above-described antibodies that specifically bind HGH for treating a GH-related disorder, comprising the step of administering the one or more antibodies to the mammal. In one aspect, the disorder is a growth disorder. In another aspect, the disorder is cancer. In another aspect, the treatment further comprises the step of administering a second therapeutic agent simultaneously or sequentially with the antibody. In one such aspect, the second therapeutic agent is selected from an anti-angiogenic agent, an anti-neoplastic agent, a chemotherapeutic agent, and a cytotoxic agent.

[0233] In one embodiment, a method of treating a mammal suffering from or at risk of developing a growth disorder is provided, comprising the step of treating the mammal with one or more Fabs of one or more of the above-described antibodies that specifically bind human growth hormone.

[0234] In one aspect, a polypeptide of the invention comprises at least one, or both, of heavy chain and light chain antibody variable domains, wherein the antibody variable domain comprises one, two or three variant CDRs as described herein (e.g., as described in the foregoing).

[0235] In some embodiments, a polypeptide of the invention (in particular those comprising an antibody variable domain) further comprises an antibody framework sequence, e.g., FR1, FR2, FR3 and/or FR4 for an antibody variable domain corresponding to the variant CDR, the FR sequences obtained from a single antibody template. In one embodiment, the FR sequences are obtained from a human antibody. In one embodiment, the FR sequences are obtained from a human consensus sequence (e.g., subgroup III consensus sequence). In one embodiment, the framework sequences comprise a modified consensus sequence as described herein (e.g., comprising modifications at position 49, 71, 93 and/or 94 in the heavy chain, and/or position 66 in the light chain). In one embodiment, framework regions have the sequences of the framework regions from wild-type humanized antibody 4D5-8 light chain and heavy chain (shown in FIG. 16 (SEQ ID NOS: 1099-1102 and 1103-1106, respectively)). In one embodiment, framework regions have the sequences of the framework regions from a variant version of the humanized antibody 4D5-8 light chain and heavy chain, wherein the light chain is modified at position 66 and the heavy chain is modified at positions 71, 73, and 78 (shown in FIG. 17 (SEQ ID NOS: 1107-1110 and 1111-1114)).

[0236] In some embodiments, a polypeptide of the invention comprises a light chain and a heavy chain antibody variable domain, wherein the light chain variable domain comprises at least 1, 2 or 3 variant CDRs selected from the group consisting of CDR L1, L2 and L3, and the heavy chain variable domain comprises at least 1, 2 or 3 variant CDRs selected from the group consisting of CDR H1, H2 and H3.

[0237] In some embodiments, a polypeptide of the invention is an ScFv. In some embodiments, it is a Fab fragment. In some embodiments, it is a F(ab)₂ or F(ab′)₂. Accordingly, in some embodiments, a polypeptide of the invention further comprises a dimerization domain. In some embodiments, the dimerization domain is located between an antibody heavy chain or light chain variable domain and at least a portion of a viral coat protein. The dimerization domain can comprise a dimerization sequence, and/or sequence comprising one or more cysteine residues. The dimerization domain can be linked, directly or indirectly, to the C-terminal end of a heavy chain variable or constant domain. The structure of the dimerization domain can be varied depending on whether the antibody variable domain is produced as a fusion protein component with the viral coat protein component (without an amber stop codon after dimerization domain) or whether the antibody variable domain is produced predominantly without viral coat protein component (e.g., with an amber stop codon after dimerization domain). When the antibody variable domain is produced predominantly as a fusion protein with viral coat protein component, one or more disulfide bond and/or a single dimerization sequence provides for bivalent display. For antibody variable domains predominantly produced without being fused to a viral coat protein component (e.g. with amber stop), it is preferable, though not required, to have a dimerization domain comprising both a cysteine residue and a dimerization sequence. In some embodiments, heavy chains of the F(ab)₂ dimerize at a dimerization domain not including a hinge region. The dimerization domain may comprise a leucine zipper sequence (for example, a GCN4 sequence such as GRMKQLEDKVEELLSKNYHLFNEVARLKKLVGERG (SEQ ID NO: 3)).

[0238] In some embodiments, a polypeptide of the invention further comprises a light chain constant domain fused to a light chain variable domain, which in some embodiments comprises at least one, two or three variant CDRs. In some embodiments of polypeptides of the invention, the polypeptide comprises a heavy chain constant domain fused to a heavy chain variable domain, which in some embodiments comprises at least one, two or three variant CDRs.

[0239] In some instances, it may be preferable to mutate a framework residue such that it is variant with respect to a reference polypeptide or source antibody. For example, framework residue 71 of the heavy chain may be amino acid R, V or A. In another example, framework residue 93 of the heavy chain may be amino acid S or A. In yet another example, framework residue 94 of the heavy chain may be amino acid R, K or T or encoded by MRT. In yet another example, framework residue 49 of the heavy chain may be amino acid A or G. Framework residues in the light chain may also be mutated. For example, framework residue 66 in the light chain may be amino acid R or G.

[0240] As described herein, a variant CDR refers to a CDR with a sequence variance as compared to the corresponding CDR of a single reference polypeptide/source antibody. Accordingly, the CDRs of a single polypeptide of the invention can in certain embodiments correspond to the set of CDRs of a single reference polypeptide or source antibody. Polypeptides of the invention may comprise any one or combinations of variant CDRs. For example, a polypeptide of the invention may comprise a variant CDRH1 and variant CDRH2. A polypeptide of the invention may comprise a variant CDRH1, variant CDRH2 and a variant CDRH3. In another example, a polypeptide of the invention may comprise a variant CDRH1, variant CDRH2, variant CDRH3 and variant CDRL3. In another example, a polypeptide of the invention comprises a variant CDRL1, variant CDRL2 and variant CDRL3. Any polypeptide of the invention may further comprise a variant CDRL3. Any polypeptide of the invention may further comprise a variant CDRH3.

[0241] In one embodiment, a polypeptide of the invention comprises one or more variant CDR sequences as depicted in FIG. 10. In one embodiment, a polypeptide of the invention comprises one or more variant CDR sequences as depicted in FIGS. 14A-C. In one embodiment, a polypeptide of the invention comprises one or more variant CDR sequences as depicted in FIGS. 15A-15B. In another embodiment, a polypeptide of the invention comprises one or more variant CDR sequences as depicted in FIGS. 21A-21B. In another embodiment, a polypeptide of the invention comprises one or more variant CDR sequences as depicted in FIG. 22A. In another embodiment, a polypeptide of the invention comprises one or more variant CDR sequences as depicted in FIG. 23A. In another embodiment, a polypeptide of the invention comprises one or more variant CDR sequences as depicted in FIGS. 24A-B. In another embodiment, a polypeptide of the invention comprises one or more variant CDR sequences as depicted in FIG. 25A. In another embodiment, a polypeptide of the invention comprises one or more variant CDR sequences as depicted in FIGS. 28A-C. In another embodiment, a polypeptide of the invention comprises one or more variant CDR sequences as depicted in FIG. 29A. In another embodiment, a polypeptide of the invention comprises one or more variant CDR sequences as depicted in FIG. 30A. In another embodiment, a polypeptide of the invention comprises one or more variant CDR sequences as depicted in FIGS. 31A-B. In another embodiment, a polypeptide of the invention comprises one or more variant CDR sequences as depicted in FIG. 32A.

[0242] Polypeptides of the invention may be in a complex with one another. For example, the invention provides a polypeptide complex comprising two polypeptides, wherein each polypeptide is a polypeptide of the invention, and wherein one of said polypeptides comprises at least one, two or all of variant CDRs H1, H2 and H3, and the other polypeptide comprises a variant light chain CDR (e.g., CDR L3). A polypeptide complex may comprise a first and a second polypeptide (wherein the first and second polypeptides are polypeptides of the invention), wherein the first polypeptide comprises at least one, two or three variant light chain CDRs, and the second polypeptide comprises at least one, two or three variant heavy chain CDRs. The invention also provides complexes of polypeptides that comprise the same variant CDR sequences. Complexing can be mediated by any suitable technique, including by dimerization/multimerization at a dimerization/multimerization domain such as those described herein or covalent interactions (such as through a disulfide linkage) (which in some contexts is part of a dimerization domain, for example a dimerization domain may contain a leucine zipper sequence and a cysteine).

[0243] In another aspect, the invention provides compositions comprising polypeptides and/or polynucleotides of the invention. For example, the invention provides a composition comprising a plurality of any of the polypeptides of the invention described herein. Said plurality may comprise polypeptides encoded by a plurality of polynucleotides generated using a set of oligonucleotides comprising degeneracy in the sequence encoding a variant amino acid, wherein said degeneracy is that of the multiple codon sequences of the restricted codon set encoding the variant amino acid. A composition comprising a polynucleotide or polypeptide or library of the invention may be in the form of a kit or an article of manufacture (optionally packaged with instructions, buffers, etc.).

[0244] In one aspect, the invention provides a polynucleotide encoding a polypeptide of the invention as described herein. In another aspect, the invention provides a vector comprising a sequence encoding a polypeptide of the invention. The vector can be, for example, a replicable expression vector (for example, the replicable expression vector can be M13, f1, fd, Pf3 phage or a derivative thereof, or a lambdoid phage, such as lambda, 21, phi80, phi81, 82, 424, 434, etc., or a derivative thereof). The vector can comprise a promoter region linked to the sequence encoding a polypeptide of the invention. The promoter can be any suitable for expression of the polypeptide, for example, the lac Z promoter system, the alkaline phosphatase pho A promoter (Ap), the bacteriophage l_{PL} promoter (a temperature sensitive promoter), the tac promoter, the tryptophan promoter, and the bacteriophage T7 promoter. Thus, the invention also provides a vector comprising a promoter selected from the group consisting of the foregoing promoter systems.

[0245] Polypeptides of the invention can be displayed in any suitable form in accordance with the need and desire of the practitioner. For example, a polypeptide of the invention can be displayed on a viral surface, for example, a phage or phagemid viral particle. Accordingly, the invention provides viral particles comprising a polypeptide of the invention and/or polynucleotide encoding a polypeptide of the invention.

[0246] In one aspect, the invention provides a population comprising a plurality of polypeptide or polynucleotide of the invention, wherein each type of polypeptide or polynucleotide is a polypeptide or polynucleotide of the invention as described herein.

[0247] In some embodiments, polypeptides and/or polynucleotides are provided as a library, for example, a library comprising a plurality of at least about 1×10⁴, 1×10⁵, 1×10⁶, 1×10⁷, 1×10⁸ distinct polypeptide and/or polynucleotide sequences of the invention. In another aspect, the invention also provides a library comprising a plurality of the viruses or viral particles of the invention, each virus or virus particle displaying a polypeptide of the invention. A library of the invention may comprise viruses or viral particles displaying any number of distinct polypeptides (sequences), for example, at least about 1×10⁴, 1×10⁵, 1×10⁶, 1×10⁷, 1×10⁸ distinct polypeptides.

[0248] In another aspect, the invention provides host cells comprising a polynucleotide or vector comprising a sequence encoding a polypeptide of the invention.

[0249] In another aspect, the invention provides methods for selecting for high affinity binders to specific target antigens. In certain such embodiments, the specific target antigen includes, but is not limited to, vascular endothelial growth factor (VEGF), HER2, insulin, IGF-1, or HGH.

[0250] The methods of the invention provide populations of polypeptides (for example, libraries of polypeptides (e.g., antibody variable domains)) with one or more diversified CDR regions. These libraries are sorted (selected) and/or screened to identify high affinity binders to a target antigen. In one aspect, polypeptide binders from the library are selected for binding to target antigens, and for affinity. The polypeptide binders selected using one or more of these selection strategies, may then be screened for affinity and/or for specificity (binding only to target antigen and not to non-target antigens).

[0251] In one aspect, a method of the invention comprises generating a plurality of polypeptides with one or more diversified CDR regions, sorting the plurality of polypeptides for binders to a target antigen by contacting the plurality of polypeptides with a target antigen under conditions suitable for binding; separating the binders to the target antigen from those that do not bind; isolating the binders; and identifying the high affinity binders (or any binders having a desired binding affinity). The affinity of the binders that bind to the target antigen can be determined using a variety of techniques known in the art, for example, competition ELISA such as described herein. Optionally, the polypeptides can be fused to a polypeptide tag, such as gD, poly his or FLAG, which can be used to sort binders in combination with sorting for the target antigen.

[0252] Another embodiment provides a method of isolating or selecting for an antibody variable domain that binds to a target antigen from a library of antibody variable domains, said method comprising: a) contacting a population comprising a plurality of polypeptides of the invention with an immobilized target antigen under conditions suitable for binding to isolate target antigen polypeptide binders; b) separating the polypeptide binders from nonbinders, and eluting the binders from the target antigen; c) optionally, repeating steps a-b at least once (in some embodiments, at least twice).

[0253] In some embodiments, a method may further comprise: d) incubating the polypeptide binders with a concentration of labeled target antigen in the range of 0.1 nM to 1000 nM under conditions suitable for binding to form a mixture; e) contacting the mixture with an immobilized agent that binds to the label on the target antigen; f) eluting the polypeptide binders from the labeled target antigen; g) optionally, repeating steps d) to f) at least once (in some embodiments, at least twice), using a successively lower concentration of labeled target antigen each time. Optionally, the method may comprise adding an excess of unlabelled target antigen to the mixture and incubating for a period of time sufficient to elute low affinity binders from the labeled target antigen.

[0254] Another aspect of the invention provides a method of isolating or selecting for high affinity binders (or binders having a desired binding affinity) to a target antigen. In one embodiment, said method comprises: a) contacting a population comprising a plurality of polypeptides of the invention with a target antigen, wherein the antigen is provided at a concentration in the range of about 0.1 nM to 1000 nM to isolate polypeptide binders to the target antigen; b) separating the polypeptide binders from the target antigen; c) optionally, repeating steps a-b at least once (in some embodiments, at least twice), each time with a successively lower concentration of target antigen to isolate polypeptide binders that bind to lowest concentration of target antigen; d) selecting the polypeptide binder that binds to the lowest concentration of the target antigen for high affinity (or any desired affinity) by incubating the polypeptide binders with several different dilutions of the target antigen and determining the IC50 of the polypeptide binder; and e) identifying a polypeptide binder that has a desired affinity for the target antigen. Said affinity can be, for example, about 0.1 nM to 200 nM, 0.5 nM to 150 nM, 1 nM to 100 nM, and/or 25 nM to 75 nM.

[0255] Another embodiment provides an assay for isolating or selecting polypeptide binders comprising (a) contacting a population comprising a plurality of polypeptides of the invention with a labeled target antigen, wherein the labeled target antigen is provided at a concentration in a range of 0.1 nM to 1000 nM, under conditions suitable for binding to form a complex of a polypeptide binder and the labeled target antigen; b) isolating the complexes and separating the polypeptide binder from the labeled target antigen; c) optionally, repeating steps a-b at least once, each time using a lower concentration of target antigen. Optionally, the method may further comprise contacting the complex of polypeptide binder and target antigen with an excess of unlabelled target antigen. In one embodiment, the steps of the method are repeated twice and the concentration of target in a first round of selection is in the range of about 100 nM to 250 nM, and, in a second round of selection (if performed) is in the range of about 25 nM to 100 nM, and in the third round of selection (if performed) is in the range of about 0.1 nM to 25 nM.

[0256] The invention also includes a method of screening a population comprising a plurality of polypeptides of the invention, said method comprising: a) incubating a first sample of the population of polypeptides with a target antigen under conditions suitable for binding of the polypeptides to the target antigen; b) subjecting a second sample of the population of polypeptides to a similar incubation but in the absence of the target antigen; (c) contacting each of the first and second sample with immobilized target antigen under conditions suitable for binding of the polypeptides to the immobilized target antigen; d) detecting amount of polypeptides bound to immobilized target antigen for each sample; e) determining affinity of a particular polypeptide for the target antigen by calculating the ratio of the amount of the particular polypeptide that is bound in the first sample over the amount of the particular polypeptide that is bound in the second sample.

[0257] The libraries generated as described herein may also be screened for binding to a specific target and for lack of binding to nontarget antigens. In one aspect, the invention provides a method of screening for a polypeptide, such as an antibody variable domain of the invention, that binds to a specific target antigen from a library of antibody variable domains, said method comprising: a) generating a population comprising a plurality of polypeptides of the invention; b) contacting the population of polypeptides with a target antigen under conditions suitable for binding; c) separating a binder polypeptide in the library from nonbinder polypeptides; d) identifying a target antigen-specific binder polypeptide by determining whether the binder polypeptide binds to a non-target antigen; and e) isolating a target antigen-specific binder polypeptide. In some embodiments, step (e) comprises eluting the binder polypeptide from the target antigen, and amplifying a replicable expression vector encoding said binder polypeptide. In some embodiments, one or more of the libraries, clones or polypeptides are screened against a panel of antigens including the target antigen. In some embodiments, those clones or polypeptides that specifically bind to the target antigen and do not substantially crossreact with any of the other antigen on the panel are selected. The panel of antigens can include at least three and up to 100 different antigens. In some cases, the panel of antigens includes 3 to 100, 3 to 50, 3 to 25, or 3 to 10 different antigens.

[0258] Combinations of any of the sorting/selection methods described above may be combined with the screening methods. For example, in one embodiment, polypeptide binders are first selected for binding to an immobilized target antigen. Polypeptide binders that bind to the immobilized target antigen can then be screened for binding to the target antigen and for lack of binding to nontarget antigens. Polypeptide binders that bind specifically to the target antigen can be amplified as necessary. These polypeptide binders can be selected for higher affinity by contact with a concentration of a labeled target antigen to form a complex, wherein the concentration range of labeled target antigen is from about 0.1 nM to about 1000 nM, and the complexes are isolated by contact with an agent that binds to the label on the target antigen. A polypeptide binder can then be eluted from the labeled target antigen and optionally, the rounds of selection are repeated, and each time a lower concentration of labeled target antigen is used. The binder polypeptides that can be isolated using this selection method can then be screened for high affinity using for example, the solution phase ELISA assay as described, e.g., in Examples 2 and 4 or other conventional methods known in the art. Populations of polypeptides of the invention used in methods of the invention can be provided in any form suitable for the selection/screening steps. For example, the polypeptides can be in free soluble form, attached to a matrix, or present at the surface of a viral particle such as phage or phagemid particle. In some embodiments of methods of the invention, the plurality of polypeptides are encoded by a plurality of replicable vectors provided in the form of a library. In selection/screening methods described herein, vectors encoding a binder polypeptide may be further amplified to provide sufficient quantities of the polypeptide for use in repetitions of the selection/screening steps (which, as indicated above, are optional in methods of the invention).

[0259] In one embodiment, the invention provides a method of selecting for a polypeptide that binds to a target antigen comprising:
[0260] a) generating a composition comprising a plurality of polypeptides of the invention as described herein;
[0261] b) selecting a polypeptide binder that binds to a target antigen from the composition;
[0262] c) isolating the polypeptide binder from the nonbinders;
[0263] d) identifying binders of the desired affinity from the isolated polypeptide binders.

[0264] In another embodiment, the invention provides a method of selecting for an antigen binding variable domain that binds to a target antigen from a library of antibody variable domains comprising:
[0265] a) contacting the library of antibody variable domains of the invention (as described herein) with a target antigen;
[0266] b) separating binders from nonbinders, and eluting the binders from the target antigen and incubating the binders in a solution with decreasing amounts of the target antigen in a concentration from about 0.1 nM to 1000 nM;
[0267] c) selecting the binders that can bind to the lowest concentration of the target antigen and that have an affinity of about 0.1 nM to 200 nM.

[0268] In some embodiments, the concentration of target antigen is about 100 to 250 nM, or about 25 to 100 nM.

[0269] In one embodiment, the invention provides a method of selecting for a polypeptide that binds to a target antigen from a library of polypeptides comprising:
[0270] a) isolating polypeptide binders to a target antigen by contacting a library comprising a plurality of polypeptides of the invention (as described herein) with an immobilized target antigen under conditions suitable for binding;
[0271] b) separating the polypeptide binders in the library from nonbinders and eluting the binders from the target antigen to obtain a subpopulation enriched for the binders; and
[0272] c) optionally, repeating steps a-b at least once (in some embodiments at least twice), each repetition using the subpopulation of binders obtained from the previous round of selection.

[0273] In some embodiments, methods of the invention further comprise the steps of:
[0274] d) incubating the subpopulation of polypeptide binders with a concentration of labeled target antigen in the range of 0.1nM to 1000 nM under conditions suitable for binding to form a mixture;
[0275] e) contacting the mixture with an immobilized agent that binds to the label on the target antigen;
[0276] f) detecting the polypeptide binders bound to labeled target antigens and eluting the polypeptide binders from the labeled target antigen;
[0277] g) optionally, repeating steps d) to f) at least once (in some embodiments, at least twice), each repetition using the subpopulation of binders obtained from the previous round of selection and using a lower concentration of labeled target antigen than the previous round.

[0278] In some embodiments, these methods further comprise adding an excess of unlabelled target antigen to the mixture and incubating for a period of time sufficient to elute low affinity binders from the labeled target antigen.

[0279] In another embodiment, the invention provides a method of isolating high affinity binders to a target antigen comprising:
[0280] a) contacting a library comprising a plurality of polypeptides of the invention (as described herein) with a target antigen in a concentration of at least about 0.1 nM to 1000 nM to isolate polypeptide binders to the target antigen;
[0281] b) separating the polypeptide binders from the target antigen to obtain a subpopulation enriched for the polypeptide binders; and
[0282] c) optionally, repeating steps a) and b) at least once (in some embodiments, at least twice), each repetition using the subpopulation of binders obtained from the previous round of selection and using a decreased concentration of target antigen than the previous round to isolate polypeptide binders that bind to the lowest concentration of target antigen.

[0283] In one aspect, the invention provides an assay for selecting polypeptide binders from a library comprising a plurality of polypeptides of the invention (as described herein) comprising:
[0284] a) contacting the library with a concentration of labeled target antigen in a concentration range of 0.1 nM to 1000 nM, under conditions suitable for binding to form a complex of a polypeptide binder and the labeled target antigen;
[0285] b) isolating the complexes and separating the polypeptide binders from the labeled target antigen to obtain a subpopulation enriched for the binders;
[0286] c) optionally, repeating steps a-b at least once (in some embodiments, at least twice), each time using the subpopulation of binders obtained from the previous round of selection and using a lower concentration of target antigen than the previous round.

[0287] In some embodiments, the method further comprises adding an excess of unlabelled target antigen to the complex of the polypeptide binder and target antigen. In some embodiments, the steps set forth above are repeated at least once (in some embodiments, at least twice) and the concentration of target in the first round of selection is about 100 nM to 250 nM, and in the second round of selection is about 25 nM to 100 nM, and in the third round of selection is about 0.1 nM to 25 nM.

[0288] In another aspect, the invention provides a method of screening a library comprising a plurality of polypeptides of the invention, said method comprising:
[0289] a) incubating a first sample of the library with a concentration of a target antigen under conditions suitable for binding of the polypeptides to the target antigen;
[0290] b) incubating a second sample of the library without a target antigen;
[0291] c) contacting each of the first and second sample with immobilized target antigen under conditions suitable for binding of the polypeptide to the immobilized target antigen;
[0292] d) detecting the polypeptide bound to immobilized target antigen for each sample;
[0293] e) determining affinity of the polypeptide for the target antigen by calculating the ratio of the amounts of bound polypeptide from the first sample over the amount of bound polypeptide from the second sample.

[0294] Diagnostic and therapeutic uses for binder polypeptides of the invention are contemplated. In one diagnostic application, the invention provides a method for determining the presence of a protein of interest comprising exposing a sample suspected of containing the protein to a binder polypeptide of the invention and determining binding of the binder polypeptide to the sample. For this use, the invention provides a kit comprising the binder polypeptide and instructions for using the binder polypeptide to detect the protein.

[0295] The invention further provides: isolated nucleic acid encoding the binder polypeptide; a vector comprising the nucleic acid, optionally, operably linked to control sequences recognized by a host cell transformed with the vector; a host cell transformed with the vector; a process for producing the binder polypeptide comprising culturing this host cell so that the nucleic acid is expressed and, optionally, recovering the binder polypeptide from the host cell culture (e.g. from the host cell culture medium).

[0296] The invention also provides a composition comprising a binder polypeptide of the invention and a carrier (e.g., a pharmaceutically acceptable carrier) or diluent. This composition for therapeutic use is sterile and may be lyophilized. Also contemplated is the use of a binder polypeptide of this invention in the manufacture of a medicament for treating an indication described herein. The composition can further comprise a second therapeutic agent such as a chemotherapeutic agent, a cytotoxic agent or an anti-angiogenic agent.

[0297] The invention further provides a method for treating a mammal, comprising administering an effective amount of a binder polypeptide of the invention to the mammal. The mammal to be treated in the method may be a nonhuman mammal, e.g. a primate suitable for gathering preclinical data or a rodent (e.g., mouse or rat or rabbit). The nonhuman mammal may be healthy (e.g. in toxicology studies) or may be suffering from a disorder to be treated with the binder polypeptide of interest. In one embodiment, the mammal is suffering from a VEGF-related disorder. In another embodiment, the mammal is suffering from an insulin-related disorder. In another embodiment, the mammal is suffering from a GH-related disorder. In another embodiment, the mammal is suffering from a HER2-related disorder. In another embodiment, the mammal is suffering from an IGF-1-related disorder.

[0298] In one embodiment, the mammal is suffering from or is at risk of developing abnormal angiogenesis (e.g., pathological angiogenesis). In one specific embodiment, the disorder is a cancer selected from the group consisting of colorectal cancer, renal cell carcinoma, ovarian cancer, lung cancer, non-small-cell lung cancer (NSCLC), bronchoalveolar carcinoma and pancreatic cancer. In another embodiment, the disorder is a disease caused by ocular neovascularisation, e.g., diabetic blindness, retinopathies, primarily diabetic retinopathy, age-induced macular degeneration and rubeosis. In another embodiment, the mammal to be treated is suffering from or is at risk of developing an edema (e.g., an edema associated with brain tumors, an edema associated with stroke, or a cerebral edema). In another embodiment, the mammal is suffering from or at risk of developing a disorder or illness selected from the group consisting of rheumatoid arthritis, inflammatory bowel disease, refractory ascites, psoriasis, sarcoidosis, arterial arteriosclerosis, sepsis, burns and pancreatitis. According to another embodiment, the mammal is suffering from or is at risk of developing a genitourinary illness selected from the group consisting of polycystic ovarian disease (POD), endometriosis and uterine fibroids. In one embodiment, the disorder is a disease caused by dysregulation of cell survival (e.g., abnormal amount of cell death), including but not limited to cancer, disorders of the immune system, disorders of the nervous system and disorders of the vascular system. The amount of binder polypeptide of the invention that is administered will be a therapeutically effective amount to treat the disorder. In dose escalation studies, a variety of doses of the binder polypeptide may be administered to the mammal. In another embodiment, a therapeutically effective amount of the binder polypeptide is administered to a human patient to treat a disorder in that patient. In one embodiment, binder polypeptides of this invention useful for treating tumors, malignancies, and other disorders related to abnormal angiogenesis, including inflammatory or immunologic disorders and/or diabetes or other insulin-related disorders described herein are Fab or scFv antibodies. Accordingly, such binder polypeptides can be used in the manufacture of a medicament for treating an inflammatory or immune disease. A mammal that is suffering from or is at risk for developing a disorder or illness described herein can be treated by administering, a second therapeutic agent, simultaneously, sequentially or in combination with, a polypeptide (e.g., an antibody) of this invention. It should be understood that other therapeutic agents, in addition to the second therapeutic agent, can be administered to the mammal or used in the manufacture of a medicament for the desired indications.

[0299] These polypeptides can be used to understand the role of host stromal cell collaboration in the growth of implanted non-host tumors, such as in mouse models wherein human tumors have been implanted. These polypeptides can be used in methods of identifying human tumors that can escape therapeutic treatment by observing or monitoring the growth of the tumor implanted into a rodent or rabbit after treatment with a polypeptide of this invention. The polypeptides of this invention can also be used to study and evaluate combination therapies with a polypeptide of this invention and other therapeutic agents. The polypeptides of this invention can be used to study the role of a target molecule of interest in other diseases by administering the polypeptides to an animal suffering from the disease or a similar disease and determining whether one or more symptoms of the disease are alleviated.

[0300] For the sake of clarity, in the description herein, unless specifically or contextually indicated otherwise, all amino acid numberings are according to Kabat et al. (see further elaboration in “Definitions” below).

### BRIEF DESCRIPTION OF THE FIGURES

[0301] FIG. 1 depicts the sequences of 4D5 light chain and heavy chain variable domain (SEQ ID NOS: 1 & 2, respectively).

[0302] FIG. 2 shows a 3-D modeled structure of humanized 4D5 showing CDR residues that form contiguous patches. Contiguous patches are formed by amino acid residues. 28, 29, 30, 31 and 32 in CDRL1; amino acids residues 50 and 53 of CDRL2; amino acid residues 91, 92, 93, 94 and 96 of CDRL3; amino acid residues 28, 30, 31, 32, 33 in CDRH1; and amino acid residues 50, 52, 53, 54, 56, and 58 in CDRH2.

[0303] FIG. 3 shows the frequency of amino acids (identified by single letter code) in human antibody light chain CDR sequences from the Kabat database. The frequency of each amino acid at a particular amino acid position is shown starting with the most frequent amino acid at that position at the left and continuing on to the right to the least frequent amino acid. The number below the amino acid represents the number of naturally occurring sequences in the Kabat database that have that amino acid in that position.

[0304] FIG. 4 shows the frequency of amino acids (identified by single letter code) in human antibody heavy chain CDR sequences from the Kabat database. The frequency of each amino acid at a particular amino acid position is shown starting with the most frequent amino acid at that position at the left and continuing on to the right to the least frequent amino acid. The number below the amino acid represents the number of naturally occurring sequences in the Kabat database that have that amino acid in that position. Framework amino acid positions 71, 93 and 94 are also shown.

[0305] FIG. 5 schematically illustrates a bicistronic vector allowing expression of separate transcripts for display of F(ab)₂. A suitable promoter drives expression of the first and second cistron. The first cistron encodes a secretion signal sequence (malE or stII), a light chain variable and constant domain and a gD tag. The second cistron encodes a secretion signal, a sequence encoding heavy chain variable domain and constant domain 1 (CH1) and cysteine dimerization domain and at least a portion of the viral coat protein.

[0306] FIG. 6 illustrates CDR positions diversified to create the YS-C and YS-D libraries, as described in Example 1. CDR positions shown are numbered according to the Kabat nomenclature.

[0307] FIG. 7 illustrates the randomization scheme for each diversified CDR position in the YS-C and YS-D libraries, as described in Example 1.

[0308] FIGS. 8A and 8B show mutagenic oligonucleotides used in the construction of the YS-C and YS-D libraries, as described in Example 1 (SEQ ID NOS:8-36). Equimolar DNA degeneracies are represented in the codon sets (W=A/T, K=G/T, M=A/C, N=A/C/G/T, R=A/G, S=G/C, Y=T/C). Codon sets are represented in the IUB code. The notation “XXX” in the H3-D6 to H3-D17 oligonucleotides represents Tyr/Ser/Gly/Ala/Asp/Glu/Phe/His/Ile/Lys/Leu/Met/Asn/Pro/Gln/Arg/Thr/Val/Trp-encoding codons at a molar ratio of 20/15/15/3.125/3.125/3.125/3.125/3.125/3.125/3.125/3.125/3.125/3.125/3.125/3.125/3.125/3.125/3.125/3.125, respectively.

[0309] FIG. 9 shows enrichment ratios for libraries YS-C and YS-D following 5 rounds of selection against human VEGF, as described in Example 2. Numbers are shown as X/Y, with X representing the number of specific or non-specific clones and Y representing the number of clones screened for a given library. Specific clones are identified as those exhibiting binding to human VEGF that was at least 15 times greater (based on ELISA signal read at 450 nm) than binding to bovine serum albumin (BSA).

[0310] FIG. 10 shows the amino acid sequences and affinity data for specific binders to human VEGF from the YS-C and YS-D libraries, as described in Example 2 (CDR sequences shown in SEQ ID NOS:37-157). The fraction of each Fab-expressing phage remaining uncomplexed in the presence of 1000 nM or 100 nM human VEGF is also provided. The on-rates (kₐ), off-rates (k_{d}), and dissociation constants (K_{D}) for certain of the Fabs as determined by BIACORE analysis are provided under the heading “kinetic parameters.” The language “N.D.B.” means that there was no detectable binding for the indicated Fab.

[0311] FIG. 11 illustrates the randomization scheme for each diversified CDR position in the YSGR-A, YSGR-B, YSGR-C, and YSGR-D libraries, as described in Example 3.

[0312] FIGS. 12A-12D show mutagenic oligonucleotides used in the construction of the YSGR-A, YSGR-B, YSGR-C, and YSGR-D libraries, as described in Example 3 (SEQ ID NOS:158-208). Equimolar DNA degeneracies are represented in the codon sets (W=A/T, K=G/T, M=A/C, N=A/C/G/T, R=A/G, S=G/C, Y=T/C). Codon sets are represented in the IUB code. The notation “XXX” in the H3-A6-H3-A17 oligonucleotides represents Tyr/Ser/Gly-encoding codons at a molar ratio of 50/25/25, respectively. The notation “XXX” in the H3-B6-H3-B17 oligonucleotides represents Tyr/Ser/Arg-encoding codons at a molar ratio of 25/50/25, respectively. The notation “XXX” in the H3-C6-H3-C17 oligonucleotides represents Tyr/Ser/Gly/Arg-encoding codons at a molar ratio of 38/25/25/12, respectively. The notation “XXX” in the H3-D6 to H3-D17 oligonucleotides represents Tyr/Ser/Gly/Arg/Asp/Glu/Phe/His/Ile/Lys/Leu/Met/Asn/Gln/Thr/Val/Trp/Pro/Ala-encoding codons at a molar ratio of 20/26/26/13/1/1/1/1/1/1/1/1/1/1/1/1/1, respectively.

[0313] FIG. 13 shows enrichment ratios for library YSGR-A-D following 5 rounds of selection against human VEGF or human insulin, as described in Example 4. Numbers are shown as X/Y, with X representing the number of unique clones and Y representing the number of clones specifically binding to human VEGF or human insulin. Specific clones are identified as those exhibiting binding to human VEGF or to human insulin that was at least ten times greater (based on ELISA signal read at 450 nm) than binding to bovine serum albumin (BSA).

[0314] FIGS. 14A-14C show amino acid sequences for CDRH1, CDRH2, CDRH3, and CDRL3 from the specific binders to human VEGF isolated from the YSGR-A-D library, as described in Example 4 (SEQ ID NOS:209-683, 1318 and 2428-2431). FIGS. 14D-14F show the results of ELISA assays for each of the clones set forth in FIGS. 14A-14C. Dark shading indicates strong binding (signal of 2 to 10) and light shading indicates weak binding (signal of 0.25 to 2).

[0315] FIGS. 15A and 15B show amino acid sequences for CDRH1, CDRH2, CDRH3, and CDRL3 from the specific binders to human insulin isolated from the YSGR-A-D library, as described in Example 4 (SEQ ID NOS:684-1098 and 1098). FIGS. 15C and 15D show the results of ELISA assays for each of the clones set forth in FIGS. 15A and 15B. Dark shading indicates strong binding (signal of 2 to 10), and light shading indicates weak binding (signal of 0.25 to 2).

[0316] FIG. 16 depicts framework region sequences of huMAb4D5-8 light and heavy chains. Numbers in superscript/bold indicate amino acid positions according to Kabat. (SEQ ID NOS:1099-1106)

[0317] FIG. 17 depicts modified/variant framework region sequences of huMAb4D5-8 light and heavy chains. Numbers in superscript/bold indicate amino acid positions according to Kabat. (SEQ ID NOS:1107-1114)

[0318] FIGS. 18A and 18B illustrate the randomization scheme for each diversified CDR position in the Binary H3 libraries (SAH3, SCH3, SFH3, SGH3, SIH3, SLH3, SNH3, SPH3, SRH3, STH3, SWH3, and SYH3), as described in Example 5. The indicated amino acid positions are numbered according to Kabat. Positions 100x refer to the two amino acid positions right before position 101. The actual numeric designation may change depending on length of CDRH3 region.

[0319] FIGS. 19A-19L show mutagenic oligonucleotides used in the construction of the Binary H3 libraries (SAH3 (FIG. 19A), SCH3 (FIG. 19B), SFH3 (FIG. 19C), SGH3 (FIG. 19D), SIH3 (FIG. 19E), SLH3 (FIG. 19F), SNH3 (FIG. 19G), SPH3 (FIG. 19H), SRH3 (FIG. 19I), STH3 (FIG. 19J), SWH3 (FIG. 19K), and SYH3 (FIG. 19L)), as described in Example 5 (SEQ ID NOS:158-160 and SEQ ID NOS:1115-1282). Equimolar DNA degeneracies are represented in the codon sets (W=A/T, K=G/T, M=A/C, N=A/C/G/T, R=A/G, S=G/C, Y=T/C). Codon sets are represented in the IUB code.

[0320] FIG. 20 shows enrichment ratios for the Binary H3 libraries (pooled SAH3, SCH3, SFH3, SGH3, SIH3, SLH3, SNH3, SPH3, SRH3, STH3, SWH3, and SYH3) and the Surface Binary libraries (pooled SY, SF, SR, and SW) following 5 rounds of selection against human VEGF, as described in Examples 6 and 8. Numbers are shown as X/Y, with X representing the number of specific or non-specific clones and Y representing the number of clones screened for a given library. Specific clones are identified as those exhibiting binding to human VEGF that was at least 10-fold greater on target-coated plates (based on ELISA signal read at 450 nm) in comparison with BSA-coated plates.

[0321] FIGS. 21A and 21B show amino acid sequences for CDRL3, CDRH1, CDRH2, and CDRH3, from the specific binders to human VEGF isolated from the pooled Binary H3 libraries (SXH3), as described in Example 6 (SEQ ID NOS:1283-1510). FIGS. 21C and 21D show the results of ELISA assays for each of the clones set forth in FIGS. 21 A and 21B. Dark shading indicates strong binding (signal of 2 to 10), and light shading indicates weak binding (signal of 0.25 to 2).

[0322] FIG. 22A shows amino acid sequences for CDRL3, CDRH1, CDRH2, and CDRH3 from the specific binders to HER2 isolated from the pooled Binary H3 libraries (SXH3), as described in Example 6 (SEQ ID NOS:1511-1618). FIG. 22B shows the results of ELISA assays for each of the clones set forth in FIG. 22A. Dark shading indicates strong binding (signal of 2 to 10).

[0323] FIG. 23A shows amino acid sequences for CDRL3, CDRH1, CDRH2, and CDRH3 from the specific binders to human insulin isolated from the pooled Binary H3 libraries (SXH3), as described in Example 6 (SEQ ID NOS:1619-1754, 224, 257, 261, 694, 1318, 724, 331, 369, 794, 379, 378, 326, 948, 967, 2422, 542, 2433, 444, 1722, 1721, 1725, 2434, 2435, and 2438). FIG. 23B shows the results of ELISA assays for some of the clones set forth in FIG. 23A. Dark shading indicates strong binding (signal of 2 to 10), and light shading indicates weak binding (signal of 0.25 to 2).

[0324] FIG. 24A and 24B shows amino acid sequences for CDRL3, CDRH1, CDRH2, and CDRH3 from the specific binders to human IGF-1 isolated from the pooled Binary H3 libraries (SXH3), as described in Example 6 (SEQ ID NOS:1755-1954, 1318, 1334, 238, 215, 303, 239, 1554, 2163, 383, 358, 320, 369, 80, 126, 444, 133, 510, 69, 1397, 2442-2447, 249, 773, 233, 690, 258, 257, 213, 216, 262, 694, 773, 210, 756, 694, 214, 223, 272, 262, 309, 259, 222, 773, 690,1535, 279, 756, 379, 320, 795, 341, 880, 1559, 1853, 418, 2439, 847, 861, 802, 793, and 2448-2473). FIG. 24C shows the results of ELISA assays for some of the clones set forth in FIGS. 24A and B. Dark shading indicates strong binding (signal of 2 to 10), and light shading indicates weak binding (signal of 0.25 to 2).

[0325] FIG. 25A shows amino acid sequence for CDRL3, CDRH1, CDRH2, and CDRH3 from the specific binders to human growth hormone (HGH) isolated from the pooled Binary H3 libraries (SXH3), as described in Example 6 (SEQ ID NOS:1955-1986). FIG. 25B shows the results of ELISA assays for each of the clones set forth in FIG. 25A. Dark shading indicates strong binding (signal of 2 to 10), and light shading indicates weak binding (signal of 0.25 to 2).

[0326] FIG. 26 illustrates the randomization scheme for each diversified CDR position in the Binary Surface libraries (SY, SW, SR, and SF), as described in Example 7. The indicated amino acid positions are numbered according to Kabat. Positions 100x refer to the two amino acid positions right before position 101. The actual numeric designation may change depending on length of CDRH3 region.

[0327] FIG. 27 shows mutagenic oligonucleotides used in the construction of certain of the Binary Surface libraries (SW, SR, and SF), as described in Example 7 (SEQ ID NOS:1987-1995). Equimolar DNA degeneracies are represented in the codon sets (W=A/T, K=G/T, M=A/C, N=A/C/G/T, R=A/G, S=G/C, Y=T/C). Codon sets are represented in the IUB code.

[0328] FIGS. 28A-C shows amino acid sequences for CDRL3, CDRH1, CDRH2, and CDRH3 from the specific binders to human VEGF isolated from the pooled Surface Binary libraries (SX-surface), as described in Example 8 (SEQ ID NOS:1996-2119, 69, 71-72, 74, 76, 78, 80, 215-216, 257, 279-280, 318-320, 326, 330, 338-339, 376, 444-445, 461, 690, 694, 701, 740, 743, 751, 773-774, 779, 849, 1287-1288, 1291, 1300-1301, 1312, 1318, 1330, 1369, 1373, 1375, 1459, 1474-1476, 1478-1481, 1485, 1490, 1649, 1766, 1772, 1956, 1962, 2010, 2015, 2094, 2104, and 2474-2562). FIG. 28D shows the results of ELISA assays for some of the clones set forth in FIG. 28A. Dark shading indicates strong binding (signal of 2 to 10), and light shading indicates weak binding (signal of 0.25 to 2).

[0329] FIG. 29A shows amino acid sequences for CDRL3, CDRH1, CDRH2, and CDRH3 from the specific binders to HER2 isolated from the pooled Surface Binary libraries (SX-surface), as described in Example 8 (SEQ ID NOS:2120-2227). FIG. 29B shows the results of ELISA assays for each of the clones set forth in FIG. 29A. Dark shading indicates strong binding (signal of 2 to 10), and light shading indicates weak binding (signal of 0.25 to 2).

[0330] FIG. 30A shows amino acid sequences for CDRL3, CDRH1, CDRH2, and CDRH3 from the specific binders to human insulin isolated from the pooled Surface Binary libraries (SX-surface), as described in Example 8 (SEQ ID NOS:2228-2271, 2563-2565, 2568-2572, 2581-2588, and 2595-2602). FIG. 30B shows the results of ELISA assays for some of the clones set forth in FIG. 30A. Dark shading indicates strong binding (signal of 2 to 10), and light shading indicates weak binding (signal of 0.25 to 2).

[0331] FIGS. 31A-B shows amino acid sequences for CDRL3, CDRH1, CDRH2, and CDRH3 from the specific binders to human IGF-1 isolated from the pooled Surface Binary libraries (SX-surface), as described in Example 8 (SEQ ID NOS:2272-2383, 67-68, 71, 78, 133, 211, 230, 233, 238, 279, 262, 303, 309, 320, 338, 418, 483, 491, 502, 510, 689, 694, 690, 733, 756, 724, 847, 861, 880, 910, 983, 1318, 1397, 1535, 1559, 1853, 1912, 2404, 2410, 2566-2567, 2573-2576, 2578-2580, 2589, 2590-2594, 2603-2609, and 2611-2625). FIG. 31C shows the results of ELISA assays for some of the clones set forth in FIGS. 31A-B. Dark shading indicates strong binding (signal of 2 to 10), and light shading indicates weak binding (signal of 0.25 to 2).

[0332] FIG. 32A shows amino acid sequences for CDRL3, CDRH1, CDRH2, and CDRH3 from the specific binders to HGH isolated from the pooled Surface Binary libraries (SX-surface), as described in Example 8 (SEQ ID NOS:2384-2427). FIG. 32B shows the results of ELISA assays for each of the clines set forth in FIG. 32A. Dark shading indicates strong binding (signal of 2 to 10), and light shading indicates weak binding (signal of 0.25 to 2).

[0333] FIGS. 33A and B depict surface plasmon resonance binding analyses of soluble Fab proteins from three HER2-binding clones (clone B11, clone G54 and clone YSGR-A-42) to immobilized HER2. Clone B11 had a kₐ of 1.9×10⁶ M⁻¹s⁻¹, a k_{d} of 1.7×10⁻³ s⁻¹, and a K_{D} of 890 pM. Clone G54 had a kₐ of 2.0×10⁵ M⁻¹s⁻¹, a k_{d} of 2.2×10⁻³ s⁻¹, and a K_{D} of 11 nM.

[0334] FIG. 34 graphically depicts the binary composition of isolated unique clones that specifically bind to VEGF, HER2, IGF-1, or insulin from each of the SXH3 and SX-surface libraries. Of the specific binders isolated from the SXH3 library, the greatest number of unique clones binding VEGF included S:Y, the greatest number of unique clones binding HER2 included S:W, the greatest number of unique clones binding IGF-1 included S:R, and the greatest number of unique clones binding insulin included S:R. Of the specific binders isolated from the SX-surface library, the greatest number of unique clones binding to VEGF or to IGF-1 included S:Y, the greatest number of unique clones binding to HER2 included S:W, and the greatest number of unique clones binding to insulin included S:R.

[0335] FIG. 35 graphically depicts the specificity of Fabs containing different binary amino acid combinations (Ser:Tyr, Ser:Trp, Ser:Arg, or Ser:Phe) obtained herein from the binary SXH3 library or the binary SX-surface library.

[0336] FIG. 36 shows the results of flow cytometric analyses of binding of anti-HER2 fabs isolated from each of the YSGR (clone A-42), SX-surface (clones G37 and G54), and SXH3 libraries (clone B11) to NR6 or H2NR6-4D5 cells, as described in Example 8.

[0337] FIG. 37 shows the sequences for CDRH1, CDRH2, CDRH3, and CDRL3 for each of HER2-binding IgGs B11, G37, G54, YSGR-A-42, YSGR-A-27, B27, G43, and YSGR-D-104 (SEQ ID NOS: 213, 216, 219, 724, 727, 331, 358, 793, 794, 802, 518, 942, 967, 1397, 1596-1598, 1617, 2124, 2147, 2159, 2186, 2194, 2626-2678, 1617, and 2213). FIG. 37 also shows the IC50 values for the Fab version of each clone.

[0338] FIG. 38 shows the results of competitive binding assays described in Example 8 to determine the ability of each of the indicated HER2-specific IgGs to compete for binding to HER2 with Omnitarg, Herceptin, and each of the other IgGs. Shaded numbers represent positive controls. Numbers in bold indicate binding competition.

### MODES FOR CARRYING OUT THE INVENTION

[0339] The invention provides novel, unconventional, greatly simplified and flexible methods for diversifying CDR sequences (including antibody variable domain sequences), and libraries comprising a multiplicity, generally a great multiplicity of diversified CDRs (including antibody variable domain sequences). Such libraries provide combinatorial libraries useful for, for example, selecting and/or screening for synthetic antibody clones with desirable activities such as binding affinities and avidities. These libraries are useful for identifying immunoglobulin polypeptide sequences that are capable of interacting with any of a wide variety of target antigens. For example, libraries comprising diversified immunoglobulin polypeptides of the invention expressed as phage displays are particularly useful for, and provide a high throughput, efficient and automatable systems of, selecting and/or screening for antigen binding molecules of interest. The methods of the invention are designed to provide high affinity binders to target antigens with minimal changes to a source or template molecule and provide for good production yields when the antibody or antigens binding fragments are produced in cell culture.

[0340] Methods and compositions of the invention provide numerous additional advantages. For example, relatively simple variant CDR sequences can be generated, using codon sets encoding a restricted number of amino acids (as opposed to the conventional approach of using codon sets encoding the maximal number of amino acids), while retaining sufficient diversity of unique target binding sequences. The simplified nature (and generally relatively smaller size) of sequence populations generated according to the invention permits further diversification once a population, or sub-population thereof, has been identified to possess the desired characteristics.

[0341] The simplified nature of sequences of target antigen binders obtained by methods of the invention leaves significantly greater room for individualized further sequence modifications to achieve the desired results. For example, such sequence modifications are routinely performed in affinity maturation, humanization, etc. By basing diversification on restricted codon sets that encode only a limited number of amino acids, it would be possible to target different epitopes using different restricted codon sets, thus providing the practitioner greater control of the diversification approach as compared with randomization based on a maximal number of amino acids. An added advantage of using restricted codon sets is that undesirable amino acids can be eliminated from the process, for example, methionine or stop codons, thus improving the overall quality and productivity of a library. Furthermore, in some instances, it may be desirable to limit the conformational diversity of potential binders. Methods and compositions of the invention provide the flexibility for achieving this objective. For example, the presence of certain amino acids, such as tyrosine, in a sequence results in fewer rotational conformations.

Definitions

[0342] Amino acids are represented herein as either a single letter code or as the three letter code or both.

[0343] The term “affinity purification” means the purification of a molecule based on a specific attraction or binding of the molecule to a chemical or binding partner to form a combination or complex which allows the molecule to be separated from impurities while remaining bound or attracted to the partner moiety.

[0344] The term “antibody” is used in the broadest sense and specifically covers single monoclonal antibodies (including agonist and antagonist antibodies), antibody compositions with polyepitopic specificity, affinity matured antibodies, humanized antibodies, chimeric antibodies, as well as antigen binding fragments (e.g., Fab, F(ab′)₂, scFv and Fv), so long as they exhibit the desired biological activity. In one embodiment, the term “antibody” also includes human antibodies. As used herein, “antibody variable domain” refers to the portions of the light and heavy chains of antibody molecules that include amino acid sequences of Complementarity Determining Regions (CDRs; i.e., CDR1, CDR2, and CDR3), and Framework Regions (FRs). V_{H} refers to the variable domain of the heavy chain. V_{L} refers to the variable domain of the light chain. According to the compositions and methods used in this invention, the amino acid positions assigned to CDRs and FRs may be defined according to Kabat (Sequences of Proteins of Immunological Interest (National Institutes of Health, Bethesda, Md., 1987 and 1991)). Amino acid numbering of antibodies or antigen binding fragments is also according to that of Kabat.

[0345] As used herein, the term “Complementarity Determining Regions (CDRs; i.e., CDR1, CDR2, and CDR3) refers to the amino acid residues of an antibody variable domain the presence of which are necessary for antigen binding. Each variable domain typically has three CDR regions identified as CDR1, CDR2 and CDR3. Each complementarity determining region may comprise amino acid residues from a “complementarity determining region” as defined by Kabat (i.e. about residues 24-34 (L1), 50-56 (L2) and 89-97 (L3) in the light chain variable domain and 31-35 (H1), 50-65 (H2) and 95-102 (H3) in the heavy chain variable domain; Kabat et al., Sequences of Proteins of Immunological Interest, 5th Ed. Public Health Service, National Institutes of Health, Bethesda, Md. (1991)) and/or those residues from a “hypervariable loop” (i.e. about residues 26-32 (L1), 50-52 (L2) and 91-96 (L3) in the light chain variable domain and 26-32 (H1), 53-55 (H2) and 96-101 (H3) in the heavy chain variable domain; Chothia and Lesk J. Mol. Biol. 196:901-917 (1987)). In some instances, a complementarity determining region can include amino acids from both a CDR region defined according to Kabat and a hypervariable loop. For example, the CDRH1 of the heavy chain of antibody 4D5 includes amino acids 26 to 35. The consensus sequence for CDRL1 (according to the Kabat definition) in the 4D5 antibody is R-A-S-Q-D-V-N-T-A-V-A (SEQ ID NO: 6). The consensus sequence for CDRL2 (according to the Kabat definition) in the 4D5 antibody is S-A-S-S-L-Y-S (SEQ ID NO: 7).

[0346] “Framework regions” (hereinafter “FR”) are those variable domain residues other than the CDR residues. Each variable domain typically has four FRs identified as FR1, FR2, FR3 and FR4. If the CDRs are defined according to Kabat, the light chain FR residues are positioned at about residues 1-23 (LCFR1), 35-49 (LCFR2), 57-88 (LCFR3), and 98-107 (LCFR4) and the heavy chain FR residues are positioned about at residues 1-30 (HCFR1), 36-49 (HCFR2), 66-94 (HCFR3), and 103-113 (HCFR4) in the heavy chain residues. If the CDRs comprise amino acid residues from hypervariable loops, the light chain FR residues are positioned about at residues 1-25 (LCFR1), 33-49 (LCFR2), 53-90 (LCFR3), and 97-107 (LCFR4) in the light chain and the heavy chain FR residues are positioned about at residues 1-25 (HCFR1), 33-52 (HCFR2), 56-95 (HCFR3), and 102-113 (HCFR4) in the heavy chain residues. In some instances, when the CDR comprises amino acids from both a CDR as defined by Kabat and those of a hypervariable loop, the FR residues can be adjusted accordingly. For example, when CDRH1 includes amino acids H26-H35, the heavy chain FR1 residues are at positions 1-25 and the FR2 residues are at positions 36-49.

[0347] As used herein, “codon set” refers to a set of different nucleotide triplet sequences used to encode desired variant amino acids. A set of oligonucleotides can be synthesized, for example, by solid phase synthesis, including sequences that represent all possible combinations of nucleotide triplets provided by the codon set and that will encode the desired group of amino acids. A standard form of codon designation is that of the IUB code, which is known in the art and described herein. A codon set typically is represented by 3 capital letters in italics, e.g. NNK, NNS, XYZ, DVK and the like. Synthesis of oligonucleotides with selected nucleotide “degeneracy” at certain positions is well known in that art, for example the TRIM approach (Knappek et al.; J. Mol. Biol. (1999), 296:57-86); Garrard & Henner, Gene (1993), 128:103). Such sets of oligonucleotides having certain codon sets can be synthesized using commercial nucleic acid synthesizers (available from, for example, Applied Biosystems, Foster City, Calif.), or can be obtained commercially (for example, from Life Technologies, Rockville, Md.). Therefore, a set of oligonucleotides synthesized having a particular codon set will typically include a plurality of oligonucleotides with different sequences, the differences established by the codon set within the overall sequence. Oligonucleotides, as used according to the invention, have sequences that allow for hybridization to a variable domain nucleic acid template and also can, but does not necessarily, include restriction enzyme sites useful for, for example, cloning purposes.

[0348] The term “restricted codon set”, and variations thereof, as used herein refers to a codon set that encodes a much more limited number of amino acids than the codon sets typically utilized in art methods of generating sequence diversity. In one aspect of the invention, restricted codon sets used for sequence diversification encode from 2 to 10, from 2 to 8, from 2 to 6, from 2 to 4, or only 2 amino acids. In some embodiments, a restricted codon set used for sequence diversification encodes at least 2 but 10 or fewer, 8 or fewer, 6 or fewer, 4 or fewer amino acids. In a typical example, a tetranomial codon set is used. Examples of tetranomial codon sets include RMC, RMG, RRC, RSA, MKC, YMT, RST, KMT, SRC, MRT and WMT, as known in the art. In another typical example, a binomial codon set is used. Examples of binomial codon sets include TMT, KAT, YAC, WAC, TWC, TYT, YTC, WTC, KTT, YCT, MCG, SCG, MGC, SGT, GRT, GKT and GYT. Determination of suitable restricted codons, and the identification of specific amino acids encoded by a particular restricted codon, is well known and would be evident to one skilled in the art. Determination of suitable amino acid sets to be used for diversification of a CDR sequence can be empirical and/or guided by criteria known in the art (e.g., inclusion of a combination of hydrophobic and hydrophilic amino acid types, etc.).

[0349] An “Fv” fragment is an antibody fragment which contains a complete antigen recognition and binding site. This region consists of a dimer of one heavy and one light chain variable domain in tight association, which can be covalent in nature, for example in scFv. It is in this configuration that the three CDRs of each variable domain interact to define an antigen binding site on the surface of the V_{H}-V_{L} dimer. Collectively, the six CDRs or a subset thereof confer antigen binding specificity to the antibody. However, even a single variable domain (or half of an Fv comprising only three CDRs specific for an antigen) has the ability to recognize and bind antigen, although usually at a lower affinity than the entire binding site.

[0350] The “Fab” fragment contains a variable and constant domain of the light chain and a variable domain and the first constant domain (CH1) of the heavy chain. F(ab′)₂ antibody fragments comprise a pair of Fab fragments which are generally covalently linked near their carboxy termini by hinge cysteines between them. Other chemical couplings of antibody fragments are also known in the art.

[0351] “Single-chain Fv” or “scFv” antibody fragments comprise the V_{H} and V_{L} domains of antibody, wherein these domains are present in a single polypeptide chain. Generally the Fv polypeptide further comprises a polypeptide linker between the V_{H} and V_{L} domains, which enables the scFv to form the desired structure for antigen binding. For a review of scFv, see Pluckthun in The Pharmacology of Monoclonal Antibodies, Vol 113, Rosenburg and Moore eds. Springer-Verlag, N.Y., pp. 269-315 (1994).

[0352] The term “diabodies” refers to small antibody fragments with two antigen-binding sites, which fragments comprise a heavy chain variable domain (V_{H}) connected to a light chain variable domain (V_{L}) in the same polypeptide chain (V_{H} and V_{L}). By using a linker that is too short to allow pairing between the two domains on the same chain, the domains are forced to pair with the complementary domains of another chain and create two antigen-binding sites. Diabodies are described more fully in, for example, EP 404,097; WO 93/11161; and Hollinger et al., Proc. Natl. Acad. Sci. USA, 90:6444-6448 (1993).

[0353] The expression “linear antibodies” refers to the antibodies described in Zapata et al., Protein Eng., 8(10):1057-1062 (1995). Briefly, these antibodies comprise a pair of tandem Fd segments (V_{H}-C_{H}1-V_{H}-C_{H}1) which, together with complementary light chain polypeptides, form a pair of antigen binding regions. Linear antibodies can be bispecific or monospecific.

[0354] The term “monoclonal antibody” as used herein refers to an antibody obtained from a population of substantially homogeneous antibodies, i.e., the individual antibodies comprising the population are identical except for possible naturally occurring mutations that may be present in minor amounts. Monoclonal antibodies are highly specific, being directed against a single antigenic site. Furthermore, in contrast to conventional (polyclonal) antibody preparations which typically include different antibodies directed against different determinants (epitopes), each monoclonal antibody is directed against a single determinant on the antigen. The modifier “monoclonal” indicates the character of the antibody as being obtained from a substantially homogeneous population of antibodies, and is not to be construed as requiring production of the antibody by any particular method. For example, the monoclonal antibodies to be used in accordance with the present invention may be made by the hybridoma method first described by Kohler et al., Nature 256:495 (1975), or may be made by recombinant DNA methods (see, e.g., U.S. Pat. No. 4,816,567). The “monoclonal antibodies” may also be isolated from phage antibody libraries using the techniques described in Clackson et al., Nature 352:624-628 (1991) and Marks et al., J. Mol. Biol. 222:581-597 (1991), for example.

[0355] The monoclonal antibodies herein specifically include “chimeric” antibodies (immunoglobulins) in which a portion of the heavy and/or light chain is identical with or homologous to corresponding sequences in antibodies derived from a particular species or belonging to a particular antibody class or subclass, while the remainder of the chain(s) is identical with or homologous to corresponding sequences in antibodies derived from another species or belonging to another antibody class or subclass, as well as fragments of such antibodies, so long as they exhibit the desired biological activity (U.S. Pat. No. 4,816,567; and Morrison et al., Proc. Natl. Acad. Sci. USA 81:6851-6855 (1984)).

[0356] “Humanized” forms of non-human (e.g., murine) antibodies are chimeric antibodies which contain minimal sequence derived from non-human immunoglobulin. For the most part, humanized antibodies are human immunoglobulins (recipient antibody) in which residues from a hypervariable region of the recipient are replaced by residues from a hypervariable region of a non-human species (donor antibody) such as mouse, rat, rabbit or nonhuman primate having the desired specificity, affinity, and capacity. In some instances, Fv framework region (FR) residues of the human immunoglobulin are replaced by corresponding non-human residues. Furthermore, humanized antibodies may comprise residues which are not found in the recipient antibody or in the donor antibody. These modifications are made to further refine antibody performance. In general, the humanized antibody will comprise substantially all of at least one, and typically two, variable domains, in which all or substantially all of the hypervariable loops correspond to those of a non-human immunoglobulin and all or substantially all of the FR regions are those of a human immunoglobulin sequence. The humanized antibody optionally also will comprise at least a portion of an immunoglobulin constant region (Fc), typically that of a human immunoglobulin. For further details, see Jones et al., Nature 321:522-525 (1986); Riechmann et al., Nature 332:323-329 (1988); and Presta, Curr. Op. Struct. Biol. 2:593-596 (1992).

[0357] A “species-dependent antibody” is one which has a stronger binding affinity for an antigen from a first mammalian species than it has for a homologue of that antigen from a second mammalian species. Normally, the species-dependent antibody “binds specifically” to a human antigen (i.e. has a binding affinity (K_{d}) value of no more than about 1×10⁻⁷ M, for example no more than about 1×10⁻⁸ M and as a further example no more than about 1×10⁻⁹ M) but has a binding affinity for a homologue of the antigen from a second nonhuman mammalian species which is at least about 50 fold, or at least about 500 fold, or at least about 1000 fold, weaker than its binding affinity for the human antigen. The species-dependent antibody can be any of the various types of antibodies as defined above, but preferably is a humanized or human antibody.

[0358] As used herein, “antibody mutant” or “antibody variant” refers to an amino acid sequence variant of the species-dependent antibody wherein one or more of the amino acid residues of the species-dependent antibody have been modified. Such mutants necessarily have less than 100% sequence identity or similarity with the species-dependent antibody. In one embodiment, the antibody mutant will have an amino acid sequence having at least 75% amino acid sequence identity or similarity with the amino acid sequence of either the heavy or light chain variable domain of the species-dependent antibody, for example at least 80%, for example at least 85%, for example at least 90%, and for example at least 95%. Identity or similarity with respect to this sequence is defined herein as the percentage of amino acid residues in the candidate sequence that are identical (i.e same residue) or similar (i.e. amino acid residue from the same group based on common side-chain properties, see below) with the species-dependent antibody residues, after aligning the sequences and introducing gaps, if necessary, to achieve the maximum percent sequence identity. None of N-terminal, C-terminal, or internal extensions, deletions, or insertions into the antibody sequence outside of the variable domain shall be construed as affecting sequence identity or similarity.

[0359] An “isolated” antibody is one which has been identified and separated and/or recovered from a component of its natural environment. Contaminant components of its natural environment are materials which would interfere with diagnostic or therapeutic uses for the antibody, and may include enzymes, hormones, and other proteinaceous or nonproteinaceous solutes. In certain embodiments, the antibody will be purified (1) to greater than 95% by weight of antibody as determined by the Lowry method, e.g., to more than 99% by weight, (2) to a degree sufficient to obtain at least 15 residues of N-terminal or internal amino acid sequence by use of a spinning cup sequenator, or (3) to homogeneity by SDS-PAGE under reducing or nonreducing conditions using Coomassie blue or, preferably, silver stain. Isolated antibody includes the antibody in situ within recombinant cells since at least one component of the antibody's natural environment will not be present. Ordinarily, however, isolated antibody will be prepared by at least one purification step.

[0360] “Cell”, “cell line”, and “cell culture” are used interchangeably herein and such designations include all progeny of a cell or cell line. Thus, for example, terms like “transformants” and “transformed cells” include the primary subject cell and cultures derived therefrom without regard for the number of transfers. It is also understood that all progeny may not be precisely identical in DNA content, due to deliberate or inadvertent mutations. Mutant progeny that have the same function or biological activity as screened for in the originally transformed cell are included. Where distinct designations are intended, it will be clear from the context.

[0361] “Control sequences” when referring to expression means DNA sequences necessary for the expression of an operably linked coding sequence in a particular host organism. The control sequences that are suitable for prokaryotes, for example, include a promoter, optionally an operator sequence, a ribosome binding site, and possibly, other as yet poorly understood sequences. Eukaryotic cells are known to utilize promoters, polyadenylation signals, and enhancers.

[0362] The term “coat protein” means a protein, at least a portion of which is present on the surface of the virus particle. From a functional perspective, a coat protein is any protein which associates with a virus particle during the viral assembly process in a host cell, and remains associated with the assembled virus until it infects another host cell. The coat protein may be the major coat protein or may be a minor coat protein. A “major” coat protein is generally a coat protein which is present in the viral coat at at least about 5, at least about 7, at least about 10 copies of the protein or more. A major coat protein may be present in tens, hundreds or even thousands of copies per virion. An example of a major coat protein is the p8 protein of filamentous phage.

[0363] The “detection limit” for a chemical entity in a particular assay is the minimum concentration of that entity which can be detected above the background level for that assay. For example, in the phage ELISA, the “detection limit” for a particular phage displaying a particular antigen binding fragment is the phage concentration at which the particular phage produces an ELISA signal above that produced by a control phage not displaying the antigen binding fragment.

[0364] A “fusion protein” and a “fusion polypeptide” refer to a polypeptide having two portions covalently linked together, where each of the portions is a polypeptide having a different property. The property may be a biological property, such as activity in vitro or in vivo. The property may also be a simple chemical or physical property, such as binding to a target antigen, catalysis of a reaction, etc. The two portions may be linked directly by a single peptide bond or through a peptide linker containing one or more amino acid residues. Generally, the two portions and the linker will be in reading frame with each other. In certain embodiments, the two portions of the polypeptide are obtained from heterologous or different polypeptides.

[0365] “Heterologous DNA” is any DNA that is introduced into a host cell. The DNA may be derived from a variety of sources including genomic DNA, cDNA, synthetic DNA and fusions or combinations of these. The DNA may include DNA from the same cell or cell type as the host or recipient cell or DNA from a different cell type, for example, from a mammal or plant. The DNA may, optionally, include marker or selection genes, for example, antibiotic resistance genes, temperature resistance genes, etc.

[0366] As used herein, “highly diverse position” refers to a position of an amino acid located in the variable regions of the light and heavy chains that have a number of different amino acids represented at the position when the amino acid sequences of known and/or naturally occurring antibodies or antigen binding fragments are compared. The highly diverse positions are typically in the CDR regions. In one aspect, the ability to determine highly diverse positions in known and/or naturally occurring antibodies is facilitated by the data provided by Kabat, Sequences of Proteins of Immunological Interest (National Institutes of Health, Bethesda, Md., 1987 and 1991). An internet-based database located at http://www.bioinf.org.uk/abs/structures.html provides an extensive collection and alignment of light (http://www.bioinf.org.uk/abs/lc.align) and heavy chain (http://www.bioinf.org.uk/abs/hc.align) sequences and facilitates determination of highly diverse positions in these sequences. According to the invention, an amino acid position is highly diverse if it has from about 2 to about 11, from about 4 to about 9, and/or from about 5 to about 7 different possible amino acid residue variations at that position. In some embodiments, an amino acid position is highly diverse if it has at least about 2, at least about 4, at least about 6, and/or at least about 8 different possible amino acid residue variations at that position.

[0367] As used herein, “library” refers to a plurality of antibody or antibody fragment sequences (for example, polypeptides of the invention), or the nucleic acids that encode these sequences, the sequences being different in the combination of variant amino acids that are introduced into these sequences according to the methods of the invention.

[0368] “Ligation” is the process of forming phosphodiester bonds between two nucleic acid fragments. For ligation of the two fragments, the ends of the fragments must be compatible with each other. In some cases, the ends will be directly compatible after endonuclease digestion. However, it may be necessary first to convert the staggered ends commonly produced after endonuclease digestion to blunt ends to make them compatible for ligation. For blunting the ends, the DNA is treated in a suitable buffer for at least 15 minutes at 15° C. with about 10 units of the Klenow fragment of DNA polymerase I or T4 DNA polymerase in the presence of the four deoxyribonucleotide triphosphates. The DNA is then purified by phenol-chloroform extraction and ethanol precipitation or by silica purification. The DNA fragments that are to be ligated together are put in solution in about equimolar amounts. The solution will also contain ATP, ligase buffer, and a ligase such as T4 DNA ligase at about 10 units per 0.5 μg of DNA. If the DNA is to be ligated into a vector, the vector is first linearized by digestion with the appropriate restriction endonuclease(s). The linearized fragment is then treated with bacterial alkaline phosphatase or calf intestinal phosphatase to prevent self-ligation during the ligation step. Other ligation methods are well known in the art.

[0369] A “mutation” is a deletion, insertion, or substitution of a nucleotide(s) relative to a reference nucleotide sequence, such as a wild type sequence.

[0370] As used herein, “natural” or “naturally occurring” antibodies, refers to antibodies identified from a nonsynthetic source, for example, from a differentiated antigen-specific B cell obtained ex vivo, or its corresponding hybridoma cell line, or from antibodies obtained from the serum of an animal. These antibodies can include antibodies generated in any type of immune response, either natural or otherwise induced. Natural antibodies include the amino acid sequences, and the nucleotide sequences that constitute or encode these antibodies, for example, as identified in the Kabat database. As used herein, natural antibodies are different than “synthetic antibodies”, synthetic antibodies referring to antibody sequences that have been changed from a source or template sequence, for example, by the replacement, deletion, or addition, of an amino acid, or more than one amino acid, at a certain position with a different amino acid, the different amino acid providing an antibody sequence different from the source antibody sequence.

[0371] “Operably linked” when referring to nucleic acids means that the nucleic acids are placed in a functional relationship with another nucleic acid sequence. For example, DNA for a presequence or secretory leader is operably linked to DNA for a polypeptide if it is expressed as a preprotein that participates in the secretion of the polypeptide; a promoter or enhancer is operably linked to a coding sequence if it affects the transcription of the sequence; or a ribosome binding site is operably linked to a coding sequence if it is positioned so as to facilitate translation. Generally, “operably linked” means that the DNA sequences being linked are contiguous and, in the case of a secretory leader, contingent and in reading frame. However, enhancers do not have to be contiguous. Linking is accomplished by ligation at convenient restriction sites. If such sites do not exist, the synthetic oligonucleotide adapters or linkers are used in accord with conventional practice.

[0372] “Phage display” is a technique by which variant polypeptides are displayed as fusion proteins to at least a portion of coat protein on the surface of phage, e.g., filamentous phage, particles. A utility of phage display lies in the fact that large libraries of randomized protein variants can be rapidly and efficiently sorted for those sequences that bind to a target antigen with high affinity. Display of peptide and protein libraries on phage has been used for screening millions of polypeptides for ones with specific binding properties. Polyvalent phage display methods have been used for displaying small random peptides and small proteins through fusions to either gene III or gene VIII of filamentous phage. Wells and Lowman, Curr. Opin. Struct. Biol., 3:355-362 (1992), and references cited therein. In monovalent phage display, a protein or peptide library is fused to a gene III or a portion thereof, and expressed at low levels in the presence of wild type gene III protein so that phage particles display one copy or none of the fusion proteins. Avidity effects are reduced relative to polyvalent phage so that sorting is on the basis of intrinsic ligand affinity, and phagemid vectors are used, which simplify DNA manipulations. Lowman and Wells, Methods: A companion to Methods in Enzymology, 3:205-0216 (1991).

[0373] A “phagemid” is a plasmid vector having a bacterial origin of replication, e.g., Co1E1, and a copy of an intergenic region of a bacteriophage. The phagemid may be used on any known bacteriophage, including filamentous bacteriophage and lambdoid bacteriophage. The plasmid will also generally contain a selectable marker for antibiotic resistance. Segments of DNA cloned into these vectors can be propagated as plasmids. When cells harboring these vectors are provided with all genes necessary for the production of phage particles, the mode of replication of the plasmid changes to rolling circle replication to generate copies of one strand of the plasmid DNA and package phage particles. The phagemid may form infectious or non-infectious phage particles. This term includes phagemids which contain a phage coat protein gene or fragment thereof linked to a heterologous polypeptide gene as a gene fusion such that the heterologous polypeptide is displayed on the surface of the phage particle.

[0374] The term “phage vector” means a double stranded replicative form of a bacteriophage containing a heterologous gene and capable of replication. The phage vector has a phage origin of replication allowing phage replication and phage particle formation. In certain embodiments, the phage is a filamentous bacteriophage, such as an M13, f1, fd, Pf3 phage or a derivative thereof, or a lambdoid phage, such as lambda, 21, phi80, phi81, 82, 424, 434, etc., or a derivative thereof.

[0375] “Oligonucleotides” are short-length, single- or double-stranded polydeoxynucleotides that are chemically synthesized by known methods (such as phosphotriester, phosphite, or phosphoramidite chemistry, using solid-phase techniques such as described in EP 266,032 published 4 May 1988, or via deoxynucleoside H-phosphonate intermediates as described by Froeshler et al., Nucl. Acids, Res., 14:5399-5407 (1986)). Further methods include the polymerase chain reaction defined below and other autoprimer methods and oligonucleotide syntheses on solid supports. All of these methods are described in Engels et al., Agnew. Chem. Int. Ed. Engl., 28:716-734 (1989). These methods are used if the entire nucleic acid sequence of the gene is known, or the sequence of the nucleic acid complementary to the coding strand is available. Alternatively, if the target amino acid sequence is known, one may infer potential nucleic acid sequences using known and preferred coding residues for each amino acid residue. The oligonucleotides can be purified on polyacrylamide gels or molecular sizing columns or by precipitation.

[0376] DNA is “purified” when the DNA is separated from non-nucleic acid impurities. The impurities may be polar, non-polar, ionic, etc.

[0377] A “source antibody”, as used herein, refers to an antibody or antigen binding fragment whose antigen binding sequence serves as the template sequence upon which diversification according to the criteria described herein is performed. In certain embodiments, an antigen binding sequence generally includes an antibody variable region, and at least one CDR including framework regions.

[0378] As used herein, “solvent accessible position” refers to a position of an amino acid residue in the variable regions of the heavy and light chains of a source antibody or antigen binding fragment that is determined, based on structure, ensemble of structures and/or modeled structure of the antibody or antigen binding fragment, as potentially available for solvent access and/or contact with a molecule, such as an antibody-specific antigen. These positions are typically found in the CDRs and on the exterior of the protein. The solvent accessible positions of an antibody or antigen binding fragment, as defined herein, can be determined using any of a number of algorithms known in the art. In certain embodiments, solvent accessible positions are determined using coordinates from a 3-dimensional model of an antibody (or portion thereof, e.g., an antibody variable domain, or CDR segment(s)), using a computer program such as the InsightII program (Accelrys, San Diego, Calif.). Solvent accessible positions can also be determined using algorithms known in the art (e.g., Lee and Richards, J. Mol. Biol. 55, 379 (1971) and Connolly, J. Appl. Cryst. 16, 548 (1983)). Determination of solvent accessible positions can be performed using software suitable for protein modeling and 3-dimensional structural information obtained from an antibody (or portion thereof). Software that can be utilized for these purposes includes SYBYL Biopolymer Module software (Tripos Associates). Generally, in certain embodiments, where an algorithm (program) requires a user input size parameter, the “size” of a probe which is used in the calculation is set at about 1.4 Angstrom or smaller in radius. In addition, determination of solvent accessible regions and area methods using software for personal computers has been described by Pacios ((1994) “ARVOMOL/CONTOUR: molecular surface areas and volumes on Personal Computers.” Comput. Chem. 18(4): 377-386; and (1995). “Variations of Surface Areas and Volumes in Distinct Molecular Surfaces of Biomolecules.” J. Mol. Model. 1: 46-53.)

[0379] A “transcription regulatory element” will contain one or more of the following components: an enhancer element, a promoter, an operator sequence, a repressor gene, and a transcription termination sequence. These components are well known in the art. U.S. Pat. No. 5,667,780.

[0380] A “transformant” is a cell which has taken up and maintained DNA as evidenced by the expression of a phenotype associated with the DNA (e.g., antibiotic resistance conferred by a protein encoded by the DNA).

[0381] “Transformation” means a process whereby a cell takes up DNA and becomes a “transformant”. The DNA uptake may be permanent or transient.

[0382] A “human antibody” is one which possesses an amino acid sequence which corresponds to that of an antibody produced by a human and/or has been made using any of the techniques for making human antibodies as disclosed herein. This definition of a human antibody specifically excludes a humanized antibody comprising non-human antigen-binding residues.

[0383] An “affinity matured” antibody is one with one or more alterations in one or more CDRs thereof which result in an improvement in the affinity of the antibody for antigen, compared to a parent antibody which does not possess those alteration(s). In certain embodiments, affinity matured antibodies will have nanomolar or even picomolar affinities for the target antigen. Affinity matured antibodies are produced by procedures known in the art. Marks et al. Bio/Technology 10:779-783 (1992) describes affinity maturation by VH and VL domain shuffling. Random mutagenesis of CDR and/or framework residues is described by: Barbas et al. Proc Nat. Acad. Sci, USA 91:3809-3813 (1994); Schier et al. Gene 169:147-155 (1995); Yelton et al. J. Immunol. 155:1994-2004 (1995); Jackson et al., J. Immunol. 154(7):3310-9 (1995); and Hawkins et al, J. Mol. Biol. 226:889-896 (1992).

[0384] A “blocking” antibody or an “antagonist” antibody is one which inhibits or reduces biological activity of the antigen it binds. In certain embodiments, blocking antibodies or antagonist antibodies substantially or completely inhibit the biological activity of the antigen.

[0385] An “agonist antibody”, as used herein, is an antibody which mimics at least one of the functional activities of a polypeptide of interest.

[0386] To increase the half-life of the antibodies or polypeptide containing the amino acid sequences of this invention, one can attach a salvage receptor binding epitope to the antibody (especially an antibody fragment), as described, e.g., in U.S. Pat. No. 5,739,277. For example, a nucleic acid molecule encoding the salvage receptor binding epitope can be linked in frame to a nucleic acid encoding a polypeptide sequence of this invention so that the fusion protein expressed by the engineered nucleic acid molecule comprises the salvage receptor binding epitope and a polypeptide sequence of this invention. As used herein, the term “salvage receptor binding epitope” refers to an epitope of the Fc region of an IgG molecule (e.g., IgG₁, IgG₂, IgG₃, or IgG₄) that is responsible for increasing the in vivo serum half-life of the IgG molecule (e.g., Ghetie, V et al., (2000) Ann. Rev. Immunol. 18:739-766, Table 1). Antibodies with substitutions in an Fc region thereof and increased serum half-lives are also described in WO00/42072 (Presta, L.), WO 02/060919; Shields, R. L., et al., (2001) JBC 276(9):6591-6604; Hinton, P. R., (2004) JBC 279(8):6213-6216). In another embodiment, the serum half-life can also be increased, for example, by attaching other polypeptide sequences. For example, antibodies of this invention or other polypeptide containing the amino acid sequences of this invention can be attached to serum albumin or a portion of serum albumin that binds to the FcRn receptor or a serum albumin binding peptide so that serum albumin binds to the antibody or polypeptide, e.g., such polypeptide sequences are disclosed in WO01/45746. In one embodiment, the serum albumin peptide to be attached comprises an amino acid sequence of DICLPRWGCLW (SEQ ID NO: 4). In another embodiment, the half-life of a Fab according to this invention is increased by these methods. See also, Dennis, M. S., et al., (2002) JBC 277(38):35035-35043 for serum albumin binding peptide sequences.

[0387] An “angiogenic factor or agent” is a growth factor which stimulates the development of blood vessels, e.g., which promotes angiogenesis, endothelial cell growth, stability of blood vessels, and/or vasculogenesis, etc. For example, angiogenic factors include, but are not limited to, e.g., VEGF and members of the VEGF family, PIGF, PDGF family, fibroblast growth factor family (FGFs), TIE ligands (Angiopoietins), ephrins, Del-1, fibroblast growth factors: acidic (aFGF) and basic (bFGF), Follistatin, Granulocyte colony-stimulating factor (G-CSF), Hepatocyte growth factor (HGF)/scatter factor (SF), Interleukin-8 (IL-8), Leptin, Midkine, Placental growth factor, Platelet-derived endothelial cell growth factor (PD-ECGF), Platelet-derived growth factor, especially PDGF-BB or PDGFR-beta, Pleiotrophin (PTN), Progranulin, Proliferin, Transforming growth factor-alpha (TGF-alpha), Transforming growth factor-beta (TGF-beta), Tumor necrosis factor-alpha (TNF-alpha), Vascular endothelial growth factor (VEGF)/vascular permeability factor (VPF), etc. The term also includes, but is not limited to, factors that accelerate wound healing, such as growth hormone, insulin-like growth factor-I (IGF-I), VIGF, epidermal growth factor (EGF), CTGF and members of its family, and TGF-alpha and TGF-beta. See, e.g., Klagsbrun and D'Amore, Annu. Rev. Physiol., 53:217-39 (1991); Streit and Detmar, Oncogene, 22:3172-3179 (2003); Ferrara & Alitalo, Nature Medicine 5(12):1359-1364 (1999); Tonini et al., Oncogene, 22:6549-6556 (2003) (e.g., Table 1 listing known angiogenic factors); and, Sato Int. J. Clin. Oncol., 8:200-206 (2003).

[0388] An “anti-angiogenesis agent” or “angiogenesis inhibitor” refers to a small molecular weight substance, a polynucleotide, a polypeptide, an isolated protein, a recombinant protein, an antibody, or conjugates or fusion proteins thereof, that inhibits angiogenesis, vasculogenesis, or undesirable vascular permeability, either directly or indirectly. It should be understood that the term anti-angiogenesis agent includes, but is not limited to, those agents that bind and block the angiogenic activity of the angiogenic factor or its receptor. For example, an anti-angiogenesis agent is an antibody or other antagonist to an angiogenic agent as defined above, e.g., antibodies to VEGF-A or to the VEGF-A receptor (e.g., KDR receptor or Flt-1 receptor), and anti-PDGFR inhibitors such as Gleevec™ (Imatinib Mesylate). Anti-angiogenesis agents also include native angiogenesis inhibitors, e.g., angiostatin, endostatin, etc. See, e.g., Klagsbrun and D'Amore, Annu. Rev. Physiol., 53:217-39 (1991); Streit and Detmar, Oncogene, 22:3172-3179 (2003) (e.g., Table 3 listing anti-angiogenic therapy in malignant melanoma); Ferrara & Alitalo, Nature Medicine 5(12): 1359-1364 (1999); Tonini et al., Oncogene, 22:6549-6556 (2003) (e.g., Table 2 listing known antiangiogenic factors); and, Sato Int. J. Clin. Oncol., 8:200-206 (2003) (e.g., Table 1 lists anti-angiogenic agents used in clinical trials).

[0389] The “Kd” or “Kd value” is the dissociation constant for the interaction of one molecule with another. In one embodiment, the Kd value is measured by a radiolabeled protein binding assay (RIA). In one embodiment, an RIA for VEGF can be performed with the Fab version of an anti-VEGF antibody and a VEGF molecule as described by the following assay that measures solution binding affinity of Fabs for VEGF by equilibrating a Fab with a minimal concentration of (¹²⁵I)-labeled VEGF in the presence of a titration series of unlabeled VEGF, then capturing bound VEGF with an anti-Fab antibody-coated plate (Chen, et al., (1999) J. Mol Biol 293:865-881). To establish conditions for the assay, microtiter plates (Dynex) are coated overnight with 5 μg/ml of a capturing anti-Fab antibody (Cappel Labs) in 50 mM sodium carbonate (pH 9.6), and subsequently blocked with 2% (w/v) bovine serum albumin in PBS for two to five hours at room temperature (approximately 23° C.). In a non-adsorbant plate (Nunc #269620), 100 pM or 26 pM [¹²⁵I]VEGF are mixed with serial dilutions of a Fab of interest, e.g., Fab-12 (Presta et al., (1997) Cancer Res. 57:4593-4599). The Fab of interest is then incubated overnight; however, the incubation may continue for 65 hours to insure that equilibrium is reached. Thereafter, the mixtures are transferred to the capture plate for incubation at room temperature for one hour. The solution is then removed and the plate washed eight times with 0.1% Tween-20 in PBS. When the plates had dried, 150 μl/well of scintillant (MicroScint-20; Packard) is added, and the plates are counted on a Topcount gamma counter (Packard) for ten minutes. Concentrations of each Fab that give less than or equal to 20% of maximal binding are chosen for use in competitive binding assays. In other embodiments, a similar RIA methodology may be used to determine the Kd of one or more anti-insulin antibodies for insulin, of one or more anti-HER2 antibodies for HER2, of one or more anti-IGF-1 antibodies for IGF-1, and of one or more anti-HGH antibodies for HGH.

[0390] According to another embodiment the Kd or Kd value can be measured by using surface plasmon resonance assays using a BIAcore™-2000 or a BIAcore™-3000 instrument (BIAcore, Inc., Piscataway, N.J.). In one embodiment, the Kd value of anti-VEGF antibodies for VEGF is determined using BIAcore™ analysis according to the following protocol. Briefly, carboxymethylated dextran biosensor chips (CM5, BIAcore Inc.) are activated with N-ethyl-N′-(3-dimethylaminopropyl)-carbodiimide hydrochloride (EDC) and N-hydroxysuccinimide (NHS) according to the supplier's instructions. Human VEGF is diluted with 10 mM sodium acetate, pH 4.8, to 5 μg/ml (˜0.2 μM) before injection at a flow rate of 5 μl/minute to achieve approximately 10 response units (RU) of coupled protein. Following the injection of human VEGF, 1M ethanolamine is injected to block unreacted groups. For kinetics measurements, two-fold serial dilutions of Fab (0.78 nM to 500 nM) are injected in PBS with 0.05% Tween 20 (PBST) at 25° C. at a flow rate of approximately 25 μl/min. Association rates (kₒₙ) and dissociation rates (k_{off}) are calculated using a simple one-to-one Langmuir binding model (BIAcore Evaluation Software version 3.2) by simultaneously fitting the association and dissociation sensorgram. The equilibrium dissociation constant (Kd) was calculated as the ratio k_{off}/kₒₙ. See, e.g., Chen, Y., et al., (1999) J. Mol Biol 293:865-881. In other embodiments, a similar BIAcore™ methodology may be used to determine the Kd of one or more anti-insulin antibodies for insulin, of one or more anti-HER2 antibodies for HER2, of one or more anti-IGF-1 antibodies for IGF-1, and of one or more anti-HGH antibodies for HGH.

[0391] An “on-rate” or “rate of association” or “association rate” or “kₒₙ” according to this invention is preferably determined with same surface plasmon resonance technique described above using a BIAcore™-2000 or a BIAcore™-3000 (BIAcore, Inc., Piscataway, N.J.) at 25° C. with immobilized hVEGF (8-109) CM5 chips at ˜10 response units (RU). Briefly, carboxymethylated dextran biosensor chips (CM5, BIAcore Inc.) are activated with N-ethyl-N′-(3-dimethylaminopropyl)-carbodiimide hydrochloride (EDC) and N-hydroxysuccinimide (NHS) according to the supplier's instructions. Human VEGF is diluted with 10 mM sodium acetate, pH 4.8, into 5 ug/ml (˜0.2 uM) before injection at a flow rate of 5 ul/minute to achieve approximately 10 response units (RU) of coupled protein. Following the injection of 1M ethanolamine to block unreacted groups. For kinetics measurements, two-fold serial dilutions of Fab (0.78 nM to 500 nM) are injected in PBS with 0.05% Tween 20 (PBST) at 25° C. at a flow rate of approximately 25 ul/min. Association rates (kₒₙ) and dissociation rates (k_{off}) are calculated using a simple one-to-one Langmuir binding model (BIAcore Evaluation Software version 3.2) by simultaneous fitting the association and dissociation sensorgram. The equilibrium dissociation constant (Kd) was calculated as the ratio k_{off}/kₒₙ. See, e.g., Chen, Y., et al., (1999) J. Mol Biol 293:865-881.

[0392] In certain embodiments, the on-rate can be determined by fluorescence quenching, for example when the on-rate exceeds 10⁶ M⁻¹ s⁻¹ as determined by surface plasmon resonance analysis. In certain such embodiments, the on-rate can be determined by using a technique that measures the increase or decrease in fluorescence emission intensity (excitation=295 nm; emission=340 min, 16 nm band-pass) at 25° C. of a 20 nM anti-VEGF or anti-insulin antibody (Fab form) in PBS, pH 7.2, in the presence of increasing concentrations of VEGF or insulin, respectively, as measured in a spectrometer, such as a stop-flow equipped spectrophometer (Aviv Instruments) or a 8000-series SLM-Aminco spectrophotometer (ThermoSpectronic) with a stirred cuvette.

[0393] The term “VEGF” or “VEGF” as used herein refers to the 165-amino acid human vascular endothelial cell growth factor and related 121-, 189-, and 206-amino acid human vascular endothelial cell growth factors, as described by Leung et al. Science, 246:1306 (1989), and Houck et al. Mol. Endocrin., 5:1806 (1991), together with the naturally occurring allelic and processed forms thereof in native-sequence or in variant form, and from any source, whether natural, synthetic, or recombinant. The term “VEGF” also refers to VEGFs from non-human species such as mouse, rat or primate. Sometimes the VEGF from a specific species is indicated by terms such as hVEGF for human VEGF, mVEGF for murine VEGF, etc. The term “VEGF” is also used to refer to truncated forms of the polypeptide comprising amino acids 8 to 109 or 1 to 109 of the 165-amino acid human vascular endothelial cell growth factor. Reference to any such forms of VEGF may be identified in the present application, e.g., by “VEGF (8-109),” “VEGF (1-109)” or “VEGF₁₆₅.” The amino acid positions for a “truncated” native VEGF are numbered as indicated in the native VEGF sequence. For example, amino acid position 17 (methionine) in truncated native VEGF is also position 17 (methionine) in native VEGF. The truncated native VEGF has binding affinity for the KDR and Flt-1 receptors comparable to native VEGF.

[0394] The term “VEGF variant” as used herein refers to a VEGF polypeptide which includes one or more amino acid mutations in the native VEGF sequence. Optionally, the one or more amino acid mutations include amino acid substitution(s). For purposes of shorthand designation of VEGF variants described herein, it is noted that numbers refer to the amino acid residue position along the amino acid sequence of the putative native VEGF (provided in Leung et al., supra and Houck et al., supra.).

[0395] The term “IGF-I” refers to insulin-like growth factor-I from any species, including bovine, ovine, porcine, equine, and human, preferably human, and from any source, whether natural, synthetic, or recombinant. This may be prepared, e.g., by the process described in EP 230,869 published Aug. 5, 1987; EP 128,733 published Dec. 19, 1984; or EP 288,451 published Oct. 26, 1988. “Native-sequence human IGF-I” or “wild-type IGF-I” is wild-type human IGF-I.

[0396] The term, “growth hormone” or “GH” refers to growth hormone in native-sequence or in variant form, and from any source, whether natural, synthetic, or recombinant. Examples include human growth hormone (hGH), which is natural or recombinant GH with the human native sequence (somatotropin or somatropin), and recombinant growth hormone (rGH), which refers to any GH or variant produced by means of recombinant DNA technology, including somatrem, somatotropin, and somatropin. Preferred herein for human use is recombinant human native-sequence, mature GH with or without a methionine at its N-terminus. More preferred is methionyl human growth hormone (met-hGH) produced in E. coli, e.g., by the process described in U.S. Pat. No. 4,755,465 issued Jul. 5, 1988 and Goeddel et al., Nature, 282: 544 (1979). Met-hGH, which is sold under the trademark Protropin® by Genentech, Inc., is identical to the natural polypeptide, with the exception of the presence of an N-terminal methionine residue. This added amino acid is a result of the bacterial protein synthesis process. Also preferred is recombinant hGH available from Genentech, Inc. under the trademark Nutropin®. This latter hGH lacks this methionine residue and has an amino acid sequence identical to that of the natural hormone. See Gray et al., Biotechnology, 2: 161 (1984). Both methionyl hGH and hGH have equivalent potencies and pharmacokinetic values. Moore et al., Endocrinology, 122: 2920-2926 (1988). Another appropriate hGH candidate is an hGH variant that is a placental form of GH with pure somatogenic and no lactogenic activity as described in U.S. Pat. No. 4,670,393 issued 2 Jun. 1987. Also included are GH variants as described in WO 90/04788 published 3 May 1990 and WO 92/09690 published 11 Jun. 1992.

[0397] The term “HER2” refers to human epidermal growth factor receptor 2 (also known as NGL and human c-erbB-2, or ERBB2), the human homolog of the rat proto-oncogene neu, in native-sequence or in variant form, and from any source, whether natural, synthetic, or recombinant.

[0398] A “disorder” is any condition that would benefit from treatment with a substance/molecule or method of the invention. This includes chronic and acute disorders or diseases including those pathological conditions which predispose the mammal to the disorder in question. Non-limiting examples of disorders to be treated herein include VEGF-related disorders, insulin-related disorders, IGF-1-related disorders, HER2-related disorders, and HGH-related disorders.

[0399] A “VEGF-related disorder” refers to one or more disorders related to VEGF deficiency, misregulation of VEGF, aberrant reactions to VEGF, and/or overproduction of VEGF. VEGF-related disorders include, but are not limited to, malignant and benign tumors, non-leukemias and lymphoid malignancies, neutronal, glial, astrocytal, hypothalamic and other glandular, macrophagal, epithelial, stromal, and blastocoelic disorders; and inflammatory, immunologic and other abnormal angiogenesis or angiogenesis-related disorders (e.g., excessive, inappropriate, or uncontrolled angiogenesis, or aberrant vascular permeability).

[0400] The term “abnormal angiogenesis” refers to excessive, insufficient or inappropriate new blood vessel growth (e.g., the location, timing or onset of the angiogenesis being undesired from a medical standpoint) in a disease state or such that it causes a disease state. Excessive, inappropriate or uncontrolled angiogenesis occurs when there is new blood vessel growth that contributes to the worsening of the disease state or causes a disease state, such as in cancer, especially vascularized solid tumors and metastatic tumors (including colon, lung cancer (especially small-cell lung cancer), or prostate cancer), diseases caused by ocular neovascularisation, especially diabetic blindness, retinopathies, primarily diabetic retinopathy or age-induced macular degeneration and rubeosis; psoriasis, psoriatic arthritis, haemangioblastoma, such as haemangioma; inflammatory renal diseases, such as glomerulonephritis, especially mesangioproliferative glomerulonephritis, haemolytic uremic syndrome, diabetic nephropathy or hypertensive nephrosclerosis; various imflammatory diseases, such as arthritis, especially rheumatoid arthritis, inflammatory bowel disease, psorsasis, sarcoidosis, arterial arteriosclerosis and diseases occurring after transplants, endometriosis or chronic asthma, etc.. The new blood vessels can feed the diseased tissues, destroy normal tissues, and in the case of cancer, the new vessels can allow tumor cells to escape into the circulation and lodge in other organs (tumor metastases). Insufficient angiogenesis occurs when inadequate blood vessel growth contributes to the worsening of a disease state, e.g., diseases such as coronary artery disease, stroke, and delayed wound healing. Further, ulcers, strokes, and heart attacks can result from the absence of angiogenesis that is normally required for natural healing. The present invention contemplates treating those patients that are at risk of developing the above-mentioned illnesses.

[0401] Other patients that are candidates for receiving the anti-VEGF antibodies or polypeptides of this invention have, or are at risk for developing, abnormal proliferation of fibrovascular tissue, acne rosacea, acquired immune deficiency syndrome, artery occlusion, atopic keratitis, bacterial ulcers, Bechets disease, blood borne tumors, carotid obstructive disease, choroidal neovascularization, chronic inflammation, chronic retinal detachment, chronic uveitis, chronic vitritis, contact lens overwear, corneal graft rejection, corneal neovascularization, corneal graft neovascularization, Crohn's disease, Eales disease, epidemic keratoconjunctivitis, fungal ulcers, Herpes simplex infections, Herpes zoster infections, hyperviscosity syndromes, Kaposi's sarcoma, leukemia, lipid degeneration, Lyme's disease, marginal keratolysis, Mooren ulcer, Mycobacteria infections other than leprosy, myopia, ocular neovascular disease, optic pits, Osler-Weber syndrome (Qsler-Weber-Rendu, osteoarthritis, Pagets disease, pars planitis, pemphigoid, phylectenulosis, polyarteritis, post-laser complications, protozoan infections, pseudoxanthoma elasticum, pterygium keratitis sicca, radial keratotomy, retinal neovascularization, retinopathy of prematurity, retrolental fibroplasias, sarcoid, scleritis, sickle cell anemia, Sogrens syndrome, solid tumors, Stargarts disease, Steven's Johnson disease, superior limbic keratitis, syphilis, systemic lupus, Terrien's marginal degeneration, toxoplasmosis, trauma, tumors of Ewing sarcoma, tumors of neuroblastoma, tumors of osteosarcoma, tumors of retinoblastoma, tumors of rhabdomyosarcoma, ulcerative colitis, vein occlusion, Vitamin A deficiency and Wegeners sarcoidosis, undesired angiogenesis associated with diabetes, parasitic diseases, abnormal wound healing, hypertrophy following surgery, injury or trauma, inhibition of hair growth, inhibition of ovulation and corpus luteum formation, inhibition of implantation and inhibition of embryo development in the uterus.

[0402] Anti-angiogenesis therapies are useful in the general treatment of graft rejection, lung inflammation, nephrotic syndrome, preeclampsia, pericardial effusion, such as that associated with pericarditis, and pleural effusion, diseases and disorders characterized by undesirable vascular permeability, e.g., edema associated with brain tumors, ascites associated with malignancies, Meigs' syndrome, lung inflammation, nephrotic syndrome, pericardial effusion, pleural effusion, permeability associated with cardiovascular diseases such as the condition following myocardial infarctions and strokes and the like.

[0403] Other angiogenesis-dependent diseases include, but are not limited to, angiofibroma (abnormal blood of vessels which are prone to bleeding), neovascular glaucoma (growth of blood vessels in the eye), arteriovenous malformations (abnormal communication between arteries and veins), nonunion fractures (fractures that will not heal), atherosclerotic plaques (hardening of the arteries), pyogenic granuloma (common skin lesion composed of blood vessels), scleroderma (a form of connective tissue disease), hemangioma (tumor composed of blood vessels), trachoma (leading cause of blindness in the third world), hemophilic joints, vascular adhesions and hypertrophic scars (abnormal scar formation).

[0404] An “insulin-related disorder” refers to one or more disorders related to insulin deficiency, misregulation of insulin, aberrant reactions to insulin, and/or overproduction of insulin. Insulin-related disorders include, but are not limited to, diabetes mellitus type I (insulin deficiency), diabetes mellitus type II (insulin resistance), cardiovascular disease (including, but not limited to, hypertension, stroke, hypertriglyceridemia, low HDL-cholesterol, hyperinsulinemia, and hyperglycemia), vision disorders (including, but not limited to, diabetic retinopathy), kidney disorders (including, but not limited to, diabetic nephropathy, diabetic glomerulosclerosis, kidney infection, and renal papillary necrosis), gastrointestinal disease (including, but not limited to, diabetic gastropathy), diabetic foot ulcers, skin disorders (including, but not limited to, diabetic thick skin, yellow skin, macroangiopathy, diabetic demopathy, pigmented purpura, yellow nails, diabetic bullae, granuloma annulare, necrobiosis lipoidica, lichen planus, bullous pemphigoid, fat hypertrophy, candida infections, pseudomonas infections, dermatophytosis, periungual telangiectasia, and erysipelas-like erythema), and diabetic neuropathies (including, but not limited to, autonomic neuropathy, sensory neuropathy, and motor neuropathy).

[0405] An “IGF-1-related disorder” refers to one or more disorders related to IGF-1 deficiency, misregulation of IGF-1, aberrant reactions to IGF-1, and/or overproduction of IGF-1. IGF-1-related disorders include, but are not limited to, benign and malignant tumors, leukemias and lymphoid malignancies, neuronal, glial, astrocytal, hypothalamic and other glandular, macrophagal, epithelial, stromal and blastocoelic disorders, and inflammatory, angiogenic and immunologic disorders, diabetic complications such as diabetic retinopathies or neuropathies, age-related macular degeneration, ophthalmic surgery such as cataract extraction, a corneal transplant, glaucoma filtration surgery and keratoplasty, surgery to correct refraction, i.e., a radial keratotomy, also in sclera macular holes and degeneration, retinal tears, vitreoretinopathy, miscellaneous disorders, cataract disorders of the cornea such as the sequelae of radial keratotomy, dry eye, viral conjunctivitis, ulcerative conjunctivitis, wounds such as corneal epithelial wounds, Sjogren's syndrome, retinal disorders such as macular and retinal edema, vision-limited scarring, retinal ischemia, and proliferative vitreous retinopathy, ischemic injury (e.g., strokes, myocardial ischemia, and ischemic injury to the kidneys), diseases associated with undesirable cell proliferation such as cancer, restenosis, and asthma, lung diseases, hyperglycemic disorders, renal disorders, such as acute and chronic renal insufficiency, end-stage chronic renal failure, glomerulonephritis, interstitial nephritis, pyelonephritis, glomerulosclerosis, e.g., Kimmelstiel-Wilson in diabetic patients and kidney failure after kidney transplantation, obesity, GH-insufficiency, Turner's syndrome, Laron's syndrome, short stature, undesirable symptoms associated with aging such as obesity and increased fat mass-to-lean ratios, immunological disorders such as immunodeficiencies including decreased CD4 counts and decreased immune tolerance or chemotherapy-induced tissue damage, bone marrow transplantation, diseases or insufficiencies of cardiac structure or function such as heart dysfunctions and congestive heart failure, neuronal, neurological, or neuromuscular disorders, e.g., peripheral neuropathy, multiple sclerosis, muscular dystrophy, or myotonic dystrophy, and catabolic states associated with wasting caused by any condition, including, e.g., trauma or wounding, or infection such as with a bacterium or human virus such as HIV, wounds, skin disorders, gut structure and function that need restoration, and so forth.

[0406] As used herein, the term “hyperglycemic disorders” refers to all forms of diabetes and disorders resulting from insulin resistance, such as Type I and Type II diabetes, as well as severe insulin resistance, hyperinsulinemia, and hyperlipidemia, e.g., obese subjects, and insulin-resistant diabetes, such as Mendenhall's Syndrome, Werner Syndrome, leprechaunism, lipoatrophic diabetes, and other lipoatrophies. The preferred hyperglycemic disorder is diabetes, especially Type 1 and Type II diabetes. “Diabetes” itself refers to a progressive disease of carbohydrate metabolism involving inadequate production or utilization of insulin and is characterized by hyperglycemia and glycosuria.

[0407] A “HER2-related disorder” refers to one or more disorders related to HER2 deficiency, misregulation of HER2, aberrant reactions to HER2, and/or overproduction of HER2. A HER2-related disorder includes, but is not limited to, benign and malignant tumors; leukemias and lymphoid malignancies; neuronal, glial, astrocytal, hypothalamic and other glandular, macrophagal, epithelial, stromal and blastocoelic disorders; and inflammatory, angiogenic and immunologic disorders as described herein and generally known in the art.

[0408] A “human growth hormone related disorder” or an “HGH-related disorder” refers to one or more disorders related to HGH deficiency, misregulation of HGH, aberrant reactions to HGH, and/or overproduction of HGH. An HGH-related disorder includes, but is not limited to, growth disorders (e.g., Turner's syndrome, idopathic short stature, GH deficiency, and the like), vascular eye disease (e.g., retinopathy of prematurity, retinopathy associated with sickle cell anemia, and age-related macular degeneration), growth- hornone-responsive malignancies (e.g., Wilm's tumor, various sarcomas (e.g., osteogenic sarcoma), and breast, colon, prostate, and thyroid cancer), diabetes and diabetes-related complications (e.g., diabetic retinopathy and diabetic nephropathy), chronic renal insufficiency, and immune disorders as described herein and generally known in the art.

[0409] The terms “cell proliferative disorder” and “proliferative disorder” refer to disorders that are associated with some degree of abnormal cell proliferation. In one embodiment, the cell proliferative disorder is cancer.

[0410] “Tumor”, as used herein, refers to all neoplastic cell growth and proliferation, whether malignant or benign, and all pre-cancerous and cancerous cells and tissues. The terms “cancer”, “cancerous”, “cell proliferative disorder”, “proliferative disorder” and “tumor” are not mutually exclusive as referred to herein.

[0411] The terms “cancer” and “cancerous” refer to or describe the physiological condition in mammals that is typically characterized by unregulated cell growth/proliferation. Examples of cancer include but are not limited to, carcinoma, lymphoma, blastoma, sarcoma, and leukemia. More particular examples of such cancers include squamous cell cancer, small-cell lung cancer, non-small cell lung cancer, adenocarcinoma of the lung, squamous carcinoma of the lung, cancer of the peritoneum, hepatocellular cancer, gastrointestinal cancer, pancreatic cancer, glioblastoma, cervical cancer, ovarian cancer, liver cancer, bladder cancer, hepatoma, breast cancer, colon cancer, colorectal cancer, endometrial or uterine carcinoma, salivary gland carcinoma, kidney cancer, liver cancer, prostate cancer, vulval cancer, thyroid cancer, hepatic carcinoma and various types of head and neck cancer.

[0412] Dysregulation of angiogenesis can lead to many disorders that can be treated by compositions and methods of the invention. These disorders include both non-neoplastic and neoplastic conditions. Neoplastics include but are not limited those described above. Non-neoplastic disorders include but are not limited to undesired or aberrant hypertrophy, arthritis, rheumatoid arthritis (RA), psoriasis, psoriatic plaques, sarcoidosis, atherosclerosis, atherosclerotic plaques, diabetic and other proliferative retinopathies including retinopathy of prematurity, retrolental fibroplasia, neovascular glaucoma, age-related macular degeneration, diabetic macular edema, corneal neovascularization, comeal graft neovascularization, corneal graft rejection, retinal/choroidal neovascularization, neovascularization of the angle (rubeosis), ocular neovascular disease, vascular restenosis, arteriovenous malformations (AVM), meningioma, hemangioma, angiofibroma, thyroid hyperplasias (including Grave's disease), corneal and other tissue transplantation, chronic inflammation, lung inflammation, acute lung injury/ARDS, sepsis, primary pulmonary hypertension, malignant pulmonary effusions, cerebral edema (e.g., associated with acute stroke/ closed head injury/ trauma), synovial inflammation, pannus formation in RA, myositis ossificans, hypertropic bone formation, osteoarthritis (OA), refractory ascites, polycystic ovarian disease, endometriosis, 3rd spacing of fluid diseases (pancreatitis, compartment syndrome, burns, bowel disease), uterine fibroids, premature labor, chronic inflammation such as IBD (Crohn's disease and ulcerative colitis), renal allograft rejection, inflammatory bowel disease, nephrotic syndrome, undesired or aberrant tissue mass growth (non-cancer), hemophilic joints, hypertrophic scars, inhibition of hair growth, Osler-Weber syndrome, pyogenic granuloma retrolental fibroplasias, scleroderma, trachoma, vascular adhesions, synovitis, dermatitis, preeclampsia, ascites, pericardial effusion (such as that associated with pericarditis), and pleural effusion.

[0413] As used herein, “treatment” refers to clinical intervention in an attempt to alter the natural course of the individual or cell being treated, and can be performed either for prophylaxis or during the course of clinical pathology. Desirable effects of treatment include preventing occurrence or recurrence of disease, alleviation of symptoms, diminishment of any direct or indirect pathological consequences of the disease, preventing metastasis, decreasing the rate of disease progression, amelioration or palliation of the disease state, and remission or improved prognosis. In some embodiments, antibodies of the invention are used to delay development of a disease or disorder.

[0414] An “effective amount” refers to an amount effective, at dosages and for periods of time necessary, to achieve the desired therapeutic or prophylactic result.

[0415] A “therapeutically effective amount” of a substance/molecule of the invention, agonist or antagonist may vary according to factors such as the disease state, age, sex, and weight of the individual, and the ability of the substance/molecule, agonist or antagonist to elicit a desired response in the individual. A therapeutically effective amount is also one in which any toxic or detrimental effects of the substance/molecule, agonist or antagonist are outweighed by the therapeutically beneficial effects. A “prophylactically effective amount” refers to an amount effective, at dosages and for periods of time necessary, to achieve the desired prophylactic result. Typically but not necessarily, since a prophylactic dose is used in subjects prior to or at an earlier stage of disease, the prophylactically effective amount will be less than the therapeutically effective amount.

[0416] “Mammal” for purposes of treatment refers to any animal classified as a mammal, including humans, domestic and farm animals, nonhuman primates, and zoo, sports, or pet animals, such as dogs, horses, cats, cows, etc.

[0417] The term “anti-neoplastic composition” refers to a composition useful in treating cancer comprising at least one active therapeutic agent, e.g., “anti-cancer agent.” Examples of therapeutic agents (anti-cancer agents) include, but are not limited to, e.g., chemotherapeutic agents, growth inhibitory agents, cytotoxic agents, agents used in radiation therapy, anti-angiogenesis agents, apoptotic agents, anti-tubulin agents, and other-agents to treat cancer, such as anti-HER-2 antibodies, anti-CD20 antibodies, an epidermal growth factor receptor (EGFR) antagonist (e.g., a tyrosine kinase inhibitor), HER1/EGFR inhibitor (e.g., erlotinib (Tarceva™), platelet derived growth factor inhibitors (e.g., Gleevec™ (Imatinib Mesylate)), a COX-2 inhibitor (e.g., celecoxib), interferons, cytokines, antagonists (e.g., neutralizing antibodies) that bind to one or more of the following targets ErbB2, ErbB3, ErbB4, PDGFR-beta, BlyS, APRIL, BCMA or VEGF receptor(s), TRAIL/Apo2, and other bioactive and organic chemical agents, etc. Combinations thereof are also included in the invention.

[0418] The term “epitope tagged” when used herein refers to an antibody mutant fused to an “epitope tag”. The epitope tag polypeptide has enough residues to provide an epitope against which an antibody thereagainst can be made, yet is short enough such that it does not interfere with activity of the antibody mutant. The epitope tag preferably also is fairly unique so that the antibody thereagainst does not substantially cross-react with other epitopes. Suitable tag polypeptides generally have at least 6 amino acid residues and usually between about 8-50 amino acid residues (in certain embodiments between about 9-30 residues). Examples include, but are not limited to, the flu HA tag polypeptide and its antibody 12CA5 (Field et al. Mol. Cell. Biol. 8:2159-2165 (1988)); the c-myc tag and the 8F9, 3C7, 6E10, G4, B7 and 9E10 antibodies thereagainst (Evan et al., Mol. Cell. Biol. 5(12):3610-3616 (1985)); and the Herpes Simplex virus glycoprotein D (gD) tag and its antibody (Paborsky et al, Protein Engineering 3(6):547-553 (1990)). In certain embodiments, the epitope tag is a “salvage receptor binding epitope”.

[0419] The term “cytotoxic agent” as used herein refers to a substance that inhibits or prevents the function of cells and/or causes destruction of cells. The term is intended to include radioactive isotopes (e.g., At²¹¹, I¹³¹, I¹²⁵, Y⁹⁰, Re¹⁸⁶, Re¹⁸⁸, Sm¹⁵³, Bi²¹², P³² and radioactive isotopes of Lu), chemotherapeutic agents e.g. methotrexate, adriamicin, vinca alkaloids (vincristine, vinblastine, etoposide), doxorubicin, melphalan, mitomycin C, chlorambucil, daunorubicin or other intercalating agents, enzymes and fragments thereof such as nucleolytic enzymes, antibiotics, and toxins such as small molecule toxins or enzymatically active toxins of bacterial, fungal, plant or animal origin, including fragments and/or variants thereof, and the various antitumor or anticancer agents disclosed below. Other cytotoxic agents are described below. A tumoricidal agent causes destruction of tumor cells.

[0420] A “chemotherapeutic agent” is a chemical compound useful in the treatment of cancer. Examples of chemotherapeutic agents include alkylating agents such as thiotepa and CYTOXAN® cyclosphosphamide; alkyl sulfonates such as busulfan, improsulfan and piposulfan; aziridines such as benzodopa, carboquone, meturedopa, and uredopa; ethylenimines and methylamelamines including altretamine, triethylenemelamine, trietylenephosphoramide, triethiylenethiophosphoramide and trimethylolomelamine; acetogenins (especially bullatacin and bullatacinone); delta-9-tetrahydrocannabinol (dronabinol, MARINOL®); beta-lapachone; lapachol; colchicines; betulinic acid; a camptothecin (including the synthetic analogue topotecan (HYCAMTIN®), CPT-11 (irinotecan, CAMPTOSAR®), acetylcamptothecin, scopolectin, and 9-aminocamptothecin); bryostatin; callystatin; CC-1065 (including its adozelesin, carzelesin and bizelesin synthetic analogues); podophyllotoxin; podophyllinic acid; teniposide; cryptophycins (particularly cryptophycin 1 and cryptophycin 8); dolastatin; duocarmycin (including the synthetic analogues, KW-2189 and CB1-TM1); eleutherobin; pancratistatin; a sarcodictyin; spongistatin; nitrogen mustards such as chlorambucil, chlomaphazine, cholophosphamide, estramustine, ifosfamide, mechlorethamine, mechlorethamine oxide hydrochloride, melphalan, novembichin, phenesterine, prednimustine, trofosfamide, uracil mustard; nitrosureas such as carmustine, chlorozotocin, fotemustine, lomustine, nimustine, and ranimnustine; antibiotics such as the enediyne antibiotics (e.g., calicheamicin, especially calicheamicin gamma1I and calicheamicin omegaI1 (see, e.g., Agnew, Chem Intl. Ed. Engl., 33: 183-186 (1994)); dynemicin, including dynemicin A; an esperamicin; as well as neocarzinostatin chromophore and related chromoprotein enediyne antibiotic chromophores), aclacinomysins, actinomycin, authramycin, azaserine, bleomycins, cactinomycin, carabicin, carminomycin, carzinophilin, chromomycinis, dactinomycin, daunorubicin, detorubicin, 6-diazo-5-oxo-L-norleucine, ADRIAMYCIN® doxorubicin (including morpholino-doxorubicin, cyanomorpholino-doxorubicin, 2-pyrrolino-doxorubicin and deoxydoxorubicin), epirubicin, esorubicin, idarubicin, marcellomycin, mitomycins such as mitomycin C, mycophenolic acid, nogalamycin, olivomycins, peplomycin, potfiromycin, puromycin, quelamycin, rodorubicin, streptonigrin, streptozocin, tubercidin, ubenimex, zinostatin, zorubicin; anti-metabolites such as methotrexate and 5-fluorouracil (5-FU); folic acid analogues such as denopterin, methotrexate, pteropterin, trimetrexate; purine analogs such as fludarabine, 6-mercaptopurine, thiamiprine, thioguanine; pyrimidine analogs such as ancitabine, azacitidine, 6-azauridine, carmofur, cytarabine, dideoxyuridine, doxifluridine, enocitabine, floxuridine; androgens such as calusterone, dromostanolone propionate, epitiostanol, mepitiostane, testolactone; anti-adrenals such as aminoglutethimide, mitotane, trilostane; folic acid replenisher such as frolinic acid; aceglatone; aldophosphamide glycoside; aminolevulinic acid; eniluracil; amsacrine; bestrabucil; bisantrene; edatraxate; defofamine; demecolcine; diaziquone; elfornithine; elliptinium acetate; an epothilone; etoglucid; gallium nitrate; hydroxyurea; lentinan; lonidainine; maytansinoids such as maytansine and ansamitocins; mitoguazone; mitoxantrone; mopidanmol; nitraerine; pentostatin; phenamet; pirarubicin; losoxantrone; 2-ethylhydrazide; procarbazine; PSK® polysaccharide complex (JHS Natural Products, Eugene, Oreg.); razoxane; rhizoxin; sizofiran; spirogermanium; tenuazonic acid; triaziquone; 2,2′,2″-trichlorotriethylamine; trichothecenes (especially T-2 toxin, verracurin A, roridin A and anguidine); urethan; vindesine (ELDISINE®, FILDESIN®); dacarbazine; mannomustine; mitobronitol; mitolactol; pipobroman; gacytosine; arabinoside (“Ara-C”); thiotepa; taxoids, e.g., TAXOL® paclitaxel (Bristol-Myers Squibb Oncology, Princeton, N.J.), ABRAXANE™ Cremophor-free, albumin-engineered nanoparticle formulation of paclitaxel (American Pharmaceutical Partners, Schaumberg, Ill.), and TAXOTERE® doxetaxel (Rhône-Poulenc Rorer, Antony, France); chloranbucil; gemcitabine (GEMZAR®); 6-thioguanine; mercaptopurine; methotrexate; platinum analogs such as cisplatin and carboplatin; vinblastine (VELBAN®); platinum; etoposide (VP-16); ifosfamide; mitoxantrone; vincristine (ONCOVIN®); oxaliplatin; leucovovin; vinorelbine (NAVELBINE®); novantrone; edatrexate; daunomycin; aminopterin; ibandronate; topoisomerase inhibitor RFS 2000; difluorometlhylornithine (DMFO); retinoids such as retinoic acid; capecitabine (XELODA®); pharmaceutically acceptable salts, acids or derivatives of any of the above; as well as combinations of two or more of the above such as CHOP, an abbreviation for a combined therapy of cyclophosphamide, doxorubicin, vincristine, and prednisolone, and FOLFOX, an abbreviation for a treatment regimen with oxaliplatin (ELOXATIN™) combined with 5-FU and leucovovin.

[0421] Also included in this definition are anti-hormonal agents that act to regulate, reduce, block, or inhibit the effects of hormones that can promote the growth of cancer, and are often in the form of systemic, or whole-body treatment. They may be hormones themselves. Examples include anti-estrogens and selective estrogen receptor modulators (SERMs), including, for example, tamoxifen (including NOLVADEX® tamoxifen), EVISTA® raloxifene, droloxifene, 4-hydroxytamoxifen, trioxifene, keoxifene, LY117018, onapristone, and FARESTON® toremifene; anti-progesterones; estrogen receptor down-regulators (ERDs); agents that function to suppress or shut down the ovaries, for example, leutinizing hormone-releasing hormone (LHRH) agonists such as LUPRON® and ELIGARD® leuprolide acetate, goserelin acetate, buserelin acetate and tripterelin; other anti-androgens such as flutamide, nilutamide and bicalutamide; and aromatase inhibitors that inhibit the enzyme aromatase, which regulates estrogen production in the adrenal glands, such as, for example, 4(5)-imidazoles, aminoglutethimide, MEGASE® megestrol acetate, AROMASIN® exemestane, formestanie, fadrozole, RIVISOR® vorozole, FEMARA® letrozole, and ARIMIDEX® anastrozole. In addition, such definition of chemotherapeutic agents includes bisphosphonates such as clodronate (for example, BONEFOS® or OSTAC®), DIDROCAL® etidronate, NE-58095, ZOMETA® zoledronic acid/zoledronate, FOSAMAX® alendronate, AREDIA® pamidronate, SKELID® tiludronate, or ACTONEL® risedronate; as well as troxacitabine (a 1,3-dioxolane nucleoside cytosine analog); antisense oligonucleotides, particularly those that inhibit expression of genes in signaling pathways implicated in abberant cell proliferation, such as, for example, PKC-alpha, Raf, H-Ras, and epidermal growth factor receptor (EGF-R); vaccines such as THERATOPE® vaccine and gene therapy vaccines, for example, ALLOVECTIN® vaccine, LEUVECTIN® vaccine, and VAXID® vaccine; LURTOTECAN® topoisomerase 1 inhibitor; ABARELIX® rmRH; lapatinib ditosylate (an ErbB-2 and EGFR dual tyrosine kinase small-molecule inhibitor also known as GW572016); and pharmaceutically acceptable salts, acids or derivatives of any of the above.

[0422] A “growth inhibitory agent” when used herein refers to a compound or composition which inhibits growth of a cell whose growth is dependent upon activity of a target molecule of interest either in vitro or in vivo. Thus, the growth inhibitory agent may be one which significantly reduces the percentage of target molecule-dependent cells in S phase. Examples of growth inhibitory agents include agents that block cell cycle progression (at a place other than S phase), such as agents that induce G1 arrest and M-phase arrest. Classical M-phase blockers include the vincas (vincristine and vinblastine), taxanes, and topoisomerase II inhibitors such as doxorubicin, epirubicin, daunorubicin, etoposide, and bleomycin. Those agents that arrest G1 also spill over into S-phase arrest, for example, DNA alkylating agents such as tamoxifen, prednisone, dacarbazine, mechlorethamine, cisplatin, methotrexate, 5-fluorouracil, and ara-C. Further information can be found in The Molecular Basis of Cancer, Mendelsohn and Israel, eds., Chapter 1, entitled “Cell cycle regulation, oncogenes, and antineoplastic drugs” by Murakami et al. (W B Saunders: Philadelphia, 1995), especially p. 13. The taxanes (paclitaxel and docetaxel) are anticancer drugs both derived from the yew tree. Docetaxel (TAXOTERE®, Rhone-Poulenc Rorer), derived from the European yew, is a semisynthetic analogue of paclitaxel (TAXOL®, Bristol-Myers Squibb). Paclitaxel and docetaxel promote the assembly of microtubules from tubulin dimers and stabilize microtubules by preventing depolymerization, which results in the inhibition of mitosis in cells.

[0423] “Doxorubicin” is an anthracycline antibiotic. The full chemical name of doxorubicin is (8S-cis)-10-[(3-amino-2,3,6-trideoxy-α-L-lyxo-hexapyranosyl)oxy]-7,8,9,10-tetrahydro-6,8,11-trihydroxy-8-(hydroxyacetyl)-1-methoxy-5,12-naphthacenedione.

[0424] The term “prodrug” as used in this application refers to a precursor or derivative form of a pharmaceutically active substance that is less cytotoxic to tumor cells compared to the parent drug and is capable of being enzymatically activated or converted into the more active parent form. See, e.g., Wilman, “Prodrugs in Cancer Chemotherapy” Biochemical Society Transactions, 14, pp. 375-382, 615th Meeting Belfast (1986) and Stella et al., “Prodrugs: A Chemical Approach to Targeted Drug Delivery,” Directed Drug Delivery, Borchardt et al., (ed.), pp. 247-267, Humana Press (1985). The prodrugs of this invention include, but are not limited to, phosphate-containing prodrugs, thiophosphate-containing prodrugs, sulfate-containing prodrugs, peptide-containing prodrugs, D-amino acid-modified prodrugs, glycosylated prodrugs, β-lactam-containing prodrugs, optionally substituted phenoxyacetamide-containing prodrugs or optionally substituted phenylacetamide-containing prodrugs, 5-fluorocytosine and other 5-fluorouridine prodrugs which can be converted into the more active cytotoxic free drug. Examples of cytotoxic drugs that can be derivatized into a prodrug form for use in this invention include, but are not limited to, those chemotherapeutic agents described above.

[0425] For the treatment of rheumatoid arthritis (“RA”), the patient can be treated with an antibody of the invention in conjunction with any one or more of the following drugs: DMARDS (disease-modifying anti-rheumatic drugs (e.g., methotrexate), NSAI or NSAID (non-steroidal anti-inflammatory drugs), HUMIRA™ (adalimumab; Abbott Laboratories), ARAVA® (leflunomide), REMICADE® (infliximab; Centocor Inc., of Malvern, Pa.), ENBREL™ (etanercept; Immunex, Wash.), and COX-2 inhibitors. DMARDs commonly used in RA are hydroxycloroquine, sulfasalazine, methotrexate, leflunomide, etanercept, infliximab, azathioprine, D-penicillamine, Gold (oral), Gold (intramuscular), minocycline, cyclosporine, and Staphylococcal protein A immunoadsorption. Adalimumab is a human monoclonal antibody that binds to TNF. Infliximab is a chimeric monoclonal antibody that binds to TNF. Etanercept is an “immunoadhesin” fusion protein consisting of the extracellular ligand binding portion of the human 75 kD (p75) tumor necrosis factor receptor (TNFR) linked to the Fc portion of a human IgG1. For conventional treatment of RA, see, e.g., “Guidelines for the management of rheumatoid arthritis” Arthritis & Rheumatism 46(2): 328-346 (February, 2002). In a specific embodiment, the RA patient is treated with a CD20 antibody of the invention in conjunction with methotrexate (MTX). An exemplary dosage of MTX is about 7.5-25 mg/kg/wk. MTX can be administered orally and subcutaneously.

[0426] For the treatment of ankylosing spondylitis, psoriatic arthritis and Crohn's disease, the patient can be treated with an antibody of the invention in conjunction with, for example, Remicade® (infliximab; from Centocor Inc., of Malvern, Pa.), and/or ENBREL (etanercept; Immunex, Wash.).

[0427] For treatments for SLE, the patient can be treated with an antibody of the invention in conjunction with, for example, a high-dose corticosteroids and/or cyclophosphamide (HDCC).

[0428] For the treatment of psoriasis, patients can be administered an antibody of this invention in conjunction with topical treatments, such as topical steroids, anthralin, calcipotriene, clobetasol, and tazarotene, or with methotrexate, retinoids, cyclosporine, PUVA and UVB therapies. In one embodiment, the psoriasis patient is treated with the antibody sequentially or concurrently with cyclosporine.

[0429] An “isolated” nucleic acid molecule is a nucleic acid molecule that is identified and separated from at least one contaminant nucleic acid molecule with which it is ordinarily associated in the natural source of the antibody nucleic acid. An isolated nucleic acid molecule is other than in the form or setting in which it is found in nature. Isolated nucleic acid molecules therefore are distinguished from the nucleic acid molecule as it exists in natural cells. However, an isolated nucleic acid molecule includes a nucleic acid molecule contained in cells that ordinarily express the antibody where, for example, the nucleic acid molecule is in a chromosomal location different from that of natural cells.

[0430] The expression “control sequences” refers to DNA sequences necessary for the expression of an operably linked coding sequence in a particular host organism. The control sequences that are suitable for prokaryotes, for example, include a promoter, optionally an operator sequence, and a ribosome binding site. Eukaryotic cells are known to utilize promoters, polyadenylation signals, and enhancers.

[0431] Nucleic acid is “operably linked” when it is placed into a functional relationship with another nucleic acid sequence. For example, DNA for a presequence or secretory leader is operably linked to DNA for a polypeptide if it is expressed as a preprotein that participates in the secretion of the polypeptide; a promoter or enhancer is operably linked to a coding sequence if it affects the transcription of the sequence; or a ribosome binding site is operably linked to a coding sequence if it is positioned so as to facilitate translation. Generally, “operably linked” means that the DNA sequences being linked are contiguous, and, in the case of a secretory leader, contiguous and in reading phase. However, enhancers do not have to be contiguous. Linking is accomplished by ligation at convenient restriction sites. If such sites do not exist, the synthetic oligonucleotide adaptors or linkers are used in accordance with conventional practice.

[0432] A “variant” or “mutant” of a starting or reference polypeptide (e.g., a source antibody or its variable domain(s)/CDR(s)), such as a fusion protein (polypeptide) or a heterologous polypeptide (heterologous to a phage), is a polypeptide that 1) has an amino acid sequence different from that of the starting or reference polypeptide and 2) was derived from the starting or reference polypeptide through either natural or artificial (manmade) mutagenesis. Such variants include, for example, deletions from, and/or insertions into and/or substitutions of, residues within the amino acid sequence of the polypeptide of interest. For example, a fusion polypeptide of the invention generated using an oligonucleotide comprising a restricted codon set that encodes a sequence with a variant amino acid (with respect to the amino acid found at the corresponding position in a source antibody/antigen binding fragment) would be a variant polypeptide with respect to a source antibody and/or antigen binding fragment and/or CDR. Thus, a variant CDR refers to a CDR comprising a variant sequence with respect to a starting or reference polypeptide sequence (such as that of a source antibody and/or antigen binding fragment and/or CDR). A variant amino acid, in this context, refers to an amino acid different from the amino acid at the corresponding position in a starting or reference polypeptide sequence (such as that of a source antibody and/or antigen binding fragment and/or CDR). Any combination of deletion, insertion, and substitution may be made to arrive at the final variant or mutant construct, provided that the final construct possesses the desired functional characteristics. In some of the examples described herein, binder sequences contain point mutations such as deletions or additions. The amino acid changes also may alter post-translational processes of the polypeptide, such as changing the number or position of glycosylation sites. Methods for generating amino acid sequence variants of polypeptides are described in U.S. Pat. No. 5,534,615, expressly incorporated herein by reference.

[0433] A “wild type” or “reference” sequence or the sequence of a “wild type” or “reference” protein/polypeptide, such as a coat protein, or a CDR or variable domain of a source antibody, maybe the reference sequence from which variant polypeptides are derived through the introduction of mutations. In general, the “wild type” sequence for a given protein is the sequence that is most common in nature. Similarly, a “wild type” gene sequence is the sequence for that gene which is most commonly found in nature. Mutations may be introduced into a “wild type” gene (and thus the protein it encodes) either through natural processes or through man induced means. The products of such processes are “variant” or “mutant” forms of the original “wild type” protein or gene.

[0434] A “plurality” of a substance, such as a polypeptide or polynucleotide of the invention, as used herein, generally refers to a collection of two or more types or kinds of the substance. There are two or more types or kinds of a substance if two or more of the substances differ from each other with respect to a particular characteristic, such as the variant amino acid found at a particular amino acid position. For example, there is a plurality of polypeptides of the invention if there are two or more polypeptides of the invention that are substantially the same, or are identical in sequence except for the sequence of a variant CDR or except for the variant amino acid at a particular solvent accessible and highly diverse amino acid position. In another example, there is a plurality of polynucleotides of the invention if there are two or more polynucleotides of the invention that are substantially the same or identical in sequence except for the sequence that encodes a variant CDR or except for the sequence that encodes a variant amino acid for a particular solvent accessible and highly diverse amino acid position.

[0435] The invention provides methods for generating and isolating novel target antigen binding polypeptides, such as antibodies or antigen binding fragments that can have a high affinity for a selected antigen. A plurality of different binder polypeptides are prepared by mutating (diversifying) one or more selected amino acid positions in a source antibody light chain variable domain and/or heavy chain variable domain with restricted codon sets to generate a library of binder polypeptides with variant amino acids in at least one CDR sequence, wherein the number of types of variant amino acids is kept to a minimum (i.e., 19 or fewer, 15 or fewer, 10 or fewer, 8 or fewer, 6 or fewer, 4 or fewer, or only 2, but generally at least 2). The amino acid positions include those that are solvent accessible, for example as determined by analyzing the structure of a source antibody, and/or that are highly diverse among known and/or natural occurring immunoglobulin polypeptides. A further advantage afforded by the limited nature of diversification of the invention is that additional amino acid positions other than those that are highly diverse and/or solvent accessible can also be diversified in accordance with the need or desire of the practitioner; examples of these embodiments are described herein.

[0436] The amino acid positions that are solvent accessible and highly diverse are in certain embodiments those in the CDR regions of the antibody variable domains selected from the group consisting of CDRL1, CDRL2, CDRL3, CDRH1, CDRH2, CDRH3, and mixtures thereof. Amino acid positions are each mutated using a restricted codon set encoding a limited number of amino acids, the choice of amino acids generally being independent of the commonly occurring amino acids at each position. In some embodiments, when a solvent accessible and highly diverse position in a CDR region is to be mutated, a codon set is selected that encodes from 2 to 19, 2 to 15, 2 to 10, from 2 to 8, from 2 to 6, from 2 to 4, and/or only 2 amino acids. In some embodiments, when a solvent accessible and highly diverse position in a CDR region is to be mutated, a codon set is selected that encodes from 2 to 10, from 3 to 9, from 4 to 8, and/or from 5 to 7 amino acids. In some embodiments, a codon set encodes at least 2, but 19 or fewer, 15 or fewer, 10 or fewer, 8 or fewer, 6 or fewer, 4 or fewer amino acids. CDR sequences can also be diversified by varying the length. For example, for CDRH3, variant CDRH3 regions can be generated that have different lengths and/or are randomized at selected positions using restricted codon sets.

[0437] The diversity of the library of the polypeptides comprising variant CDRs is designed using codon sets that encode only a limited number of amino acids, such that a minimum but sufficient amount of sequence diversity is introduced into a CDR. The number of positions mutated in the CDR is minimized and the variant amino acids at each position are designed to include a limited number of amino acids, independent of the amino acids that deemed to be commonly occurring at that position in known and/or naturally occurring CDRs. In certain embodiments, a single antibody, including at least one CDR, is used as the source antibody. It is surprising that a library of antibody variable domains having diversity in sequences and size can be generated using a single source antibody as a template and targeting diversity to particular positions using an unconventionally limited number of amino acid substitutions.

[0438] Design of Diversity of Antibody Variable Domains

[0439] In one aspect of the invention, high quality libraries of antibody variable domains are generated. The libraries have restricted diversity of different sequences of CDR sequences, for example, diversity of the antibody variable domains. The libraries include high affinity binding antibody variable domains for one or more antigens, including, for example, insulin and human VEGF. The diversity in the library is designed by selecting amino acid positions that are solvent accessible and highly diverse in a single source antibody and mutating those positions in at least one CDR using restricted codon sets. The restricted codon set can in certain embodiments encode fewer than 19, 15, 10, 8, 6, or 4 amino acids, or encodes only 2 amino acids.

[0440] One source antibody is humanized antibody 4D5, but the methods for diversification can be applied to other source antibodies whose sequence is known. A source antibody can be a naturally occurring antibody, synthetic antibody, recombinant antibody, humanized antibody, germ line derived antibody, chimeric antibody, affinity matured antibody, or antigen binding fragment thereof. The antibodies can be obtained from a variety of mammalian species including humans, mice and rats. In some embodiments, a source antibody is an antibody that is obtained after one or more initial affinity screening rounds, but prior to an affinity maturation step(s). A source antibody may be selected or modified to provide for high yield and stability when produced in cell culture.

[0441] Antibody 4D5 is a humanized antibody specific for a cancer-associated antigen known as Her-2 (erbB2). The antibody includes variable domains having consensus framework regions; a few positions were reverted to mouse sequence during the process of increasing affinity of the humanized antibody. The sequence and crystal structure of humanized antibody 4D5 have been described in U.S. Pat. No. 6,054,297, Carter et al, PNAS 89:4285 (1992), the crystal structure is shown in J Mol. Biol. 229:969 (1993) and online at http://www.ncbi.nlm.nih.gov/Structure/mmdb/mmdbsrv.cgi?form=6&db=t&Dopt=s&uid=990, http://www.ncbi.nlm.nih.gov/Structure/mmdb/mmdbsrv.cgi?form=6&db=t&Dopt=s&uid=991, and http://www.ncbi.nlm.nih.gov/Structure/mmdb/mmdbsrv.cgi?fom=6&db=t&Dopt=s&uid=992.

[0442] A criterion for generating diversity in antibody variable domains is to mutate residues at positions that are solvent accessible (as defined above). These positions are typically found in the CDRs, and are typically on the exterior of the protein. In certain embodiments, solvent accessible positions are determined using coordinates from a 3-dimensional model of an antibody, using a computer program such as the InsightII program (Accelrys, San Diego, Calif.). Solvent accessible positions can also be determined using algorithms known in the art (e.g., Lee and Richards, J. Mol. Biol. 55, 379 (1971) and Connolly, J. Appl. Cryst. 16, 548 (1983)). Determination of solvent accessible positions can be performed using software suitable for protein modeling and 3-dimensional structural information obtained from an antibody. Software that can be utilized for these purposes includes SYBYL Biopolymer Module software (Tripos Associates). Generally in certain embodiments, where an algorithm (program) requires a user input size parameter, the “size” of a probe which is used in the calculation is set at about 1.4 Angstrom or smaller in radius. In addition, determination of solvent accessible regions and area methods using software for personal computers has been described by Pacios ((1994) “ARVOMOL/CONTOUR: molecular surface areas and volumes on Personal Computers”, Comput. Chem. 18(4): 377-386; and “Variations of Surface Areas and Volumes in Distinct Molecular Surfaces of Biomolecules.” J. Mol. Model. (1995), 1: 46-53).

[0443] In some instances, selection of solvent accessible residues is further refined by choosing solvent accessible residues that collectively form a minimum contiguous patch, for example when the reference polypeptide or source antibody is in its 3-D folded structure. For example, as shown in FIG. 2, a compact (minimum) contiguous patch is formed by residues selected for CDRH1/H2/H3/L1/L2/L3 of humanized 4D5. A compact (minimum) contiguous patch may comprise only a subset (for example, 2-5 CDRs) of the full range of CDRs, for example, CDRH1/H2/H3/L3. Solvent accessible residues that do not contribute to formation of such a patch may optionally be excluded from diversification. Refinement of selection by this criterion permits the practitioner to minimize, as desired, the number of residues to be diversified. For example, residue 28 in H1 can optionally be excluded in diversification since it is on the edge of the patch. However, this selection criterion can also be used, where desired, to choose residues to be diversified that may not necessarily be deemed solvent accessible. For example, a residue that is not deemed solvent accessible, but forms a contiguous patch in the 3-D folded structure with other residues that are deemed solvent accessible may be selected for diversification. An example of this is CDRL1-29. Selection of such residues would be evident to one skilled in the art, and its appropriateness can also be determined empirically and according to the needs and desires of the skilled practitioner.

[0444] The solvent accessible positions identified from the crystal structure of humanized antibody 4D5 for each CDR are as follows (residue position according to Kabat):

[0445] CDRL1: 28, 30, 31, 32

[0446] CDRL2: 50, 53

[0447] CDRL3: 91, 92, 93, 94, 96

[0448] CDRH1: 28, 30, 31, 32, 33

[0449] CDRH2: 50, 52, 52A, 53, 54, 55, 56, 57, 58.

[0450] In addition, in some embodiments, residue 29 of CDRL1 may also be selected based on its inclusion in a contiguous patch comprising other solvent accessible residues. All or a subset of the solvent accessible positions as set forth above may be diversified in methods and compositions of the invention. For example, in some embodiments, only positions 50, 52, 52a, 53-56, and 58 are randomized in CDRH2.

[0451] Another criterion for selecting positions to be mutated is those positions which show variability in amino acid sequence when the sequences of known and/or natural antibodies are compared. A highly diverse position refers to a position of an amino acid located in the variable regions of the light or heavy chains that have a number of different amino acids represented at the position when the amino acid sequences of known and/or natural antibodies/antigen binding fragments are compared. The highly diverse positions can be in the CDR regions. The positions of CDRH3 are all considered highly diverse. In certain embodiments, amino acid residues are highly diverse if they have from about 2 to about 19 (although the numbers can range as described herein) different possible amino acid residue variations at that position.

[0452] In one aspect, identification of highly diverse positions in known and/or naturally occurring antibodies is facilitated by the data provided by Kabat, Sequences of Proteins of Immunological Interest (National Institutes of Health, Bethesda, Md., 1987 and 1991). An internet-based database located at http://www.bioinf.org.uk/abs/structures.html, provides an extensive collection and alignment of light (http://www.bioinf.org.uk/abs/lc.align) and heavy chain (http://www.bioinf.org.uk/abs/hc.align) sequences and facilitates determination of highly diverse positions in these sequences. The diversity at the solvent accessible positions of humanized antibody 4D5 in known and/or naturally occurring light and heavy chains is shown in FIGS. 3 and 4.

[0453] In one aspect of the invention, the highly diverse and solvent accessible residues in at least one, two, three, four, five or all CDRs selected from the group consisting of CDRL1, CDRL2, CDRL3, CDRH1, CDRH2, CDRH3, and mixtures thereof are mutated (i.e., randomized using restricted codon sets as described herein). For example, a population of polypeptides may be generated by diversifying at least one solvent accessible and/or highly diverse residue in CDRL3 and CDRH3 using restricted codons. Accordingly, the invention provides for a large number of novel antibody sequences formed by replacing at least one solvent accessible and highly diverse position of at least one CDR of the source antibody variable domain with variant amino acids encoded by a restricted codon. For example, a variant CDR or antibody variable domain can comprise a variant amino acid in one or more of amino acid positions 28, 29, 30, 31, 32, 33, and/or 34 of CDRH1; and/or in one or more of amino acid positions 50, 52, 52a, 53, 54, 55, 56 and/or 58 of CDRH2; and/or in one or more of amino acid positions 95-100, 100a, 100b, 100c, 101, and/or 102 of CDRH3; and/or in one or more of amino acid positions 28, 29, 30 and/or 31 of CDRL1; and/or in one or more of amino acid positions 50 and/or 53 in CDRL2; and/or in one or more of amino acid positions 91, 92, 93, 94, 95 and/or 96 in CDRL3. In another example, a variant CDR or antibody variable domain can comprise a variant amino acid in one or more of amino acid positions 28, 30, 31, 32, and/or 33 of CDRH1; and/or in one or more of amino acid positions 50, 52, 53, 54, 56 and/or 58 of CDRH2; and/or in one or more of amino acid positions 95-100, 100a, 100b, 100c, 101 and/or 102 of CDRH3; and/or in one or more of amino acid positions 28, 29, 30 and/or 31 of CDRL1; and/or in one or more of amino acid positions 50 and/or 53 in CDRL2; and/or in one or more of amino acid positions 91, 92, 93, 94, and/or 96 in CDRL3. The variant amino acids at these positions are encoded by restricted codon sets, as described herein.

[0454] As discussed above, the variant amino acids are encoded by restricted codon sets. A codon set is a set of different nucleotide triplet sequences which can be used to form a set of oligonucleotides used to encode the desired group of amino acids. A set of oligonucleotides can be synthesized, for example, by solid phase synthesis, containing sequences that represent all possible combinations of nucleotide triplets provided by the codon set and that will encode the desired group of amino acids. Synthesis of oligonucleotides with selected nucleotide “degeneracy” at certain positions is well known in that art. Such sets of nucleotides having certain codon sets can be synthesized using commercial nucleic acid synthesizers (available from, for example, Applied Biosystems, Foster City, Calif.), or can be obtained commercially (for example, from Life Technologies, Rockville, Md.). Therefore, a set of oligonucleotides synthesized having a particular codon set will typically include a plurality of oligonucleotides with different sequences, the differences established by the codon set within the overall sequence. Oligonucleotides, as used according to the invention, have sequences that allow for hybridization to a variable domain nucleic acid template and also can include restriction enzyme sites for cloning purposes.

[0455] In one aspect, the restricted repertoire of amino acids intended to occupy one or more of the solvent accessible and highly diverse positions in CDRs of humanized antibody 4D5 are determined (based on the desire of the practitioner, which can be based on any of a number of criteria, including specific amino acids desired for particular positions, specific amino acid(s) desired to be absent from a particular position, size of library desired, characteristic of antigen binders sought, etc.).

[0456] Heavy chain CDR3s (CDRH3s) in known antibodies have diverse sequences, structural conformations, and lengths. CDRH3s are often found in the middle of the antigen binding pocket and often participate in antigen contact. The design of CDRH3 may thus be developed separately from that of the other CDRs because it can be difficult to predict the structural conformation of CDRH3 and the amino acid diversity in this region is especially diverse in known antibodies. In accordance with the present invention, CDRH3 is designed to generate diversity at specific positions within CDRH3, for example, at positions 95, 96, 97, 98, 99, 100, 100a, 100b, 100c, 101, and/or 102 (e.g., according to Kabat numbering in antibody 4D5). In some embodiments, diversity is also generated by varying CDRH3 length using restricted codon sets. Length diversity can be of any range determined empirically to be suitable for generating a population of polypeptides containing substantial proportions of antigen binding proteins. For example, polypeptides comprising variant CDRH3 can be generated having the sequence X1-X2-X3-X4-X5-(X6)ₙ-X7-X8-X9-D-Y (SEQ ID NO: 2658), wherein X1-X9 are amino acids encoded by restricted codon sets, and n is of various lengths, for example, n=3- 11, 5-11, or 7-11. Other examples of possible n values are 5, 6, 7, 8, 9, 10, and 11. Illustrative embodiments of oligonucleotides that can be utilized to provide for variety in CDRH3 sequence length include those shown in FIGS. 8A and 8B, FIGS. 12A-12D, FIGS. 19A-19L, and FIG. 27.

[0457] It is contemplated that the sequence diversity of libraries created by introduction of variant amino acids in a particular CDR, for example, CDRH3, can be increased by combining the variant CDR with other CDRs comprising variations in other regions of the antibody, specifically in other CDRs of either the light or heavy chain variable sequences. It is contemplated that the nucleic acid sequences that encode members of this set can be further diversified by introduction of other variant amino acids in the CDRs of either the light or heavy chain sequences, via codon sets. Thus, for example, in one embodiment, CDRH3 sequences from fusion polypeptides that bind a target antigen can be combined with diversified CDRL3, CDRH1, or CDRH2 sequences, or any combination of diversified CDRs.

[0458] It should be noted that in some instances framework residues may be varied relative to the sequence of a source antibody or antigen binding fragment, for example, to reflect a consensus sequence or to improve stability or display. For example, framework residues 49, 93, 94 or 71 in the heavy chain may be varied. Heavy chain framework residue 93 may be serine or alanine (which is the human consensus sequence amino acid at that position.) Heavy chain framework residue 94 may be changed to reflect framework consensus sequence from threonine to arginine or lysine. Another example of a framework residue that may be altered is heavy chain framework residue 71, which is R in about 1970 polypeptides, V in about 627 polypeptides and A in about 527 polypeptides, as found in the Kabat database. Heavy chain framework residue 49 may be alanine or glycine. In addition, optionally, the 3 N-terminal amino acids of the heavy chain variable domain can be removed. In the light chain, optionally, the arginine at amino acid position 66 can be changed to glycine. In one embodiment, heavy chain framework residue 93 is alanine and heavy chain framework residue 94 is arginine.

[0459] In one aspect, the invention provides vector constructs for generating fusion polypeptides that bind with significant affinity to potential ligands. These constructs comprise a dimerizable domain that when present in a fusion polypeptide provides for increased tendency for heavy chains to dimerize to form dimers of Fab or Fab′ antibody fragments/portions. These dimerization domains may include, e.g., a heavy chain hinge sequence (for example, a sequence comprising TCPPCPAPELLG (SEQ ID NO: 5) that may be present in the fusion polypeptide). Dimerization domains in fusion phage polypeptides bring two sets of fusion polypeptides (LC/HC-phage protein/fragment (such as pIII)) together, thus allowing formation of suitable linkages (such as interheavy chain disulfide bridges) between the two sets of fusion polypeptides. Vector constructs containing such dimerization domains can be used to achieve divalent display of antibody variable domains, for example the diversified fusion proteins described herein, on phage. In certain embodiments, the intrinsic affinity of each monomeric antibody fragment (fusion polypeptide) is not significantly altered by fusion to the dimerization domain. In certain embodiments, dimerization results in divalent phage display which provides increased avidity of pliage binding, with significant decrease in off-rate, which can be determined by methods known in the art and as described herein. Dimerization domain-containing vectors of the invention may or may not also include an amber stop codon after the dimerization domain.

[0460] Dimerization can be varied to achieve different display characteristics. Dimerization domains can comprise a sequence comprising a cysteine residue, a hinge region from a full-length antibody, a dimerization sequence such as leucine zipper sequence or GCN4 zipper sequence or mixtures thereof. Dimerization sequences are known in the art, and include, for example, the GCN4 zipper sequence (GRMKQLEDKVEELLSKNYHLENEVARLKKLVGERG) (SEQ ID NO: 3). The dimerization domain is in certain embodiments located at the C-terminal end of the heavy chain variable or constant domain sequence and/or between the heavy chain variable or constant domain sequence and any viral coat protein component sequence. An amber stop codon may also be present at or after the C-terminal end of the dimerization domain. In one embodiment, wherein an amber stop codon is present, the dimerization domain encodes at least one cysteine and a dimerizing sequence such as leucine zipper. In another embodiment, wherein no amber stop codon is present, the dimerization domain may comprise a single cysteine residue.

[0461] The polypeptides of the invention can also be fused to other types of polypeptides in order to provide for display of the variant polypeptides or to provide for purification, screening or sorting, and detection of the polypeptide. For embodiment involving phage display, the polypeptides of the invention are fused to all or a portion of a viral coat protein. Examples of viral coat protein include protein PIII, major coat protein, pVIII, Soc, Hoc, gpD, pVI and variants thereof. In addition, the variant polypeptides generated according to the methods of the invention can optionally be fused to a polypeptide marker or tag such as FLAG, polyhistidine, gD, c-myc, B-galactosidase and the like.

[0462] Methods of Generating Libraries of Randomized Variable Domains

[0463] Methods of substituting an amino acid of choice into a template nucleic acid are well established in the art, some of which are described herein. For example, libraries can be created by targeting solvent accessible and/or highly diverse positions in at least one CDR region for amino acid substitution with variant amino acids using the Kunkel method. See, for example, Kunkel et al., Methods Enzymol. (1987), 154:367-382. Generation of randomized sequences is also described below in the Examples.

[0464] The sequence of oligonucleotides includes one or more of the designed restricted codon sets for different lengths of CDRH3 or for the solvent accessible and highly diverse positions in a CDR. A codon set is a set of different nucleotide triplet sequences used to encode desired variant amino acids. Codon sets can be represented using symbols to designate particular nucleotides or equimolar mixtures of nucleotides as shown below according to the IUB code. Typically, a codon set is represented by three capital letters, e.g., KMT, TMT and the like.

[0465] IUB CODES

[0466] G Guanine

[0467] A Adenine

[0468] T Thymine

[0469] C Cytosine

[0470] R (A or G)

[0471] Y (C or T)

[0472] M (A or C)

[0473] K (G or T)

[0474] S (C or G)

[0475] W (A or T)

[0476] H (A or C or T)

[0477] B (C or G or T)

[0478] V (A or C or G)

[0479] D (A or G or T)

[0480] N (A or C or G or T)

[0481] For example, in the codon set TMT, T is the nucleotide thymine; and M can be A or C. This codon set can present multiple codons and can encode only a limited number of amino acids, namely tyrosine and serine.

[0482] Oligonucleotide or primer sets can be synthesized using standard methods. A set of oligonucleotides can be synthesized, for example, by solid phase synthesis, containing sequences that represent all possible combinations of nucleotide triplets provided by the restricted codon set and that will encode the desired restricted group of amino acids. Synthesis of oligonucleotides with selected nucleotide “degeneracy” at certain positions is well known in that art. Such sets of oligonucleotides having certain codon sets can be synthesized using commercial nucleic acid synthesizers (available from, for example, Applied Biosystems, Foster City, Calif.), or can be obtained commercially (for example, from Life Technologies, Rockville, Md.). Therefore, a set of oligonucleotides synthesized having a particular codon set will typically include a plurality of oligonucleotides with different sequences, the differences established by the codon set within the overall sequence. Oligonucleotides, as used according to the invention, have sequences that allow for hybridization to a CDR (for example, as contained within a variable domain) nucleic acid template and also can include restriction enzyme sites for cloning purposes.

[0483] In one method, nucleic acid sequences encoding variant amino acids can be created by oligonucleotide-mediated mutagenesis of a nucleic acid sequence encoding a source or template polypeptide such as the antibody variable domain of 4D5. This teclmique is well known in the art as described by Zoller et al. Nucleic Acids Res. 10:6487-6504(1987). Briefly, nucleic acid sequences encoding variant amino acids are created by hybridizing an oligonucleotide set encoding the desired restricted codon sets to a DNA template, where the template is the single-stranded form of the plasmid containing a variable region nucleic acid template sequence. After hybridization, DNA polymerase is used to synthesize an entire second complementary strand of the template that will thus incorporate the oligonucleotide primer, and will contain the restricted codon sets as provided by the oligomicleotide set. Nucleic acids encoding other source or template molecules are known or can be readily determined.

[0484] Generally, oligonucleotides of at least 25 nucleotides in length are used. An optimal oligonucleotide will have at least 12 to 15 nucleotides that are completely complementary to the template on either side of the nucleotide(s) coding for the mutation(s). This ensures that the oligonucleotide will hybridize properly to the single-stranded DNA template molecule. The oligonucleotides are readily synthesized using techniques known in the art such as that described by Crea et al., Proc. Natl. Acad. Sci. USA, 75:5765 (1978).

[0485] The DNA template is generated by those vectors that are either derived from bacteriophage M13 vectors (the commercially available M13mp18 and M13mp19 vectors are suitable), or those vectors that contain a single-stranded phage origin of replication as described by Viera et al., Meth. Enzymol., 153:3 (1987). Thus, the DNA that is to be mutated can be inserted into one of these vectors in order to generate single-stranded template. Production of the single-stranded template is described in sections 4.21-4.41 of Sambrook et al., above.

[0486] To alter the native DNA sequence, the oligonucleotide is hybridized to the single stranded template under suitable hybridization conditions. A DNA polymerizing enzyme, usually T7 DNA polymerase or the Klenow fragment of DNA polymerase I, is then added to synthesize the complementary strand of the template using the oligonucleotide as a primer for synthesis. A heteroduplex molecule is thus formed such that one strand of DNA encodes the mutated form of gene 1, and the other strand (the original template) encodes the native, unaltered sequence of gene 1. This heteroduplex molecule is then transformed into a suitable host cell, usually a prokaryote such as E. coli JM101. After growing the cells, they are plated onto agarose plates and screened using the oligonucleotide primer radiolabelled with a 32-Phosphate to identify the bacterial colonies that contain the mutated DNA.

[0487] The method described immediately above may be modified such that a homoduplex molecule is created wherein both strands of the plasmid contain the mutation(s). The modifications are as follows: The single stranded oligonucleotide is annealed to the single-stranded template as described above. A mixture of three deoxyribonucleotides, deoxyriboadenosine (dATP), deoxyriboguanosine (dGTP), and deoxyribothymidine (dTT), is combined with a modified thiodeoxyribocytosine called dCTP-(aS) (which can be obtained from Amersham). This mixture is added to the template-oligonucleotide complex. Upon addition of DNA polymerase to this mixture, a strand of DNA identical to the template except for the mutated bases is generated. In addition, this new strand of DNA will contain dCTP-(aS) instead of dCTP, which serves to protect it from restriction endonuclease digestion. After the template strand of the double-stranded heteroduplex is nicked with an appropriate restriction enzyme, the template strand can be digested with ExoIII nuclease or another appropriate nuclease past the region that contains the site(s) to be mutagenized. The reaction is then stopped to leave a molecule that is only partially single-stranded. A complete double-stranded DNA homoduplex is then formed using DNA polymerase in the presence of all four deoxyribonucleotide triphosphates, ATP, and DNA ligase. This homoduplex molecule can then be transformed into a suitable host cell.

[0488] As indicated previously the sequence of the oligonucleotide set is of sufficient length to hybridize to the template nucleic acid and may also, but does not necessarily, contain restriction sites. The DNA template can be generated by those vectors that are either derived from bacteriophage M13 vectors or vectors that contain a single-stranded phage origin of replication as described by Viera et al. ((1987) Meth. Enzymol., 153:3). Thus, the DNA that is to be mutated must be inserted into one of these vectors in order to generate single-stranded template. Production of the single-stranded template is described in sections 4.21-4.41 of Sambrook et al., supra.

[0489] According to another method, a library can be generated by providing upstream and downstream oligonucleotide sets, each set having a plurality of oligonucleotides with different sequences, the different sequences established by the codon sets provided within the sequence of the oligonucleotides. The upstream and downstream oligonucleotide sets, along with a variable domain template nucleic acid sequence, can be used in a polymerase chain reaction to generate a “library” of PCR products. The PCR products can be referred to as “nucleic acid cassettes”, as they can be fused with other related or unrelated nucleic acid sequences, for example, viral coat protein components and dimerization domains, using established molecular biology techniques.

[0490] The sequence of the PCR primers includes one or more of the designed codon sets for the solvent accessible and highly diverse positions in a CDR region. As described above, a codon set is a set of different nucleotide triplet sequences used to encode desired variant amino acids.

[0491] Oligonucleotide sets can be used in a polymerase chain reaction using a variable region nucleic acid template sequence as the template to create nucleic acid cassettes. The variable region nucleic acid template sequence can be any portion of the light or heavy immunoglobulin chains containing the target nucleic acid sequences (i.e., nucleic acid sequences encoding amino acids targeted for substitution). The variable region nucleic acid template sequence is a portion of a double stranded DNA molecule having a first nucleic acid strand and complementary second nucleic acid strand. The variable region nucleic acid template sequence contains at least a portion of a variable domain and has at least one CDR. In some cases, the variable region nucleic acid template sequence contains more than one CDR. An upstream portion and a downstream portion of the variable region nucleic acid template sequence can be targeted for hybridization with members of an upstream oligonucleotide set and a downstream oligonucleotide set.

[0492] A first oligonucleotide of the upstream primer set can hybridize to the first nucleic acid strand and a second oligonucleotide of the downstream primer set can hybridize to the second nucleic acid strand. The oligonucleotide primers can include one or more codon sets and be designed to hybridize to a portion of the variable region nucleic acid template sequence. Use of these oligonucleotides can introduce two or more codon sets into the PCR product (i.e., the nucleic acid cassette) following PCR. The oligonucleotide primer that hybridizes to regions of the nucleic acid sequence encoding the antibody variable domain includes portions that encode CDR residues that are targeted for amino acid substitution.

[0493] The upstream and downstream oligonucleotide sets can also be synthesized to include restriction sites within the oligonucleotide sequence. These restriction sites can facilitate the insertion of the nucleic acid cassettes [i.e., PCR reaction products] into an expression vector having additional antibody sequences. In certain embodiments, the restriction sites are designed to facilitate the cloning of the nucleic acid cassettes without introducing extraneous nucleic acid sequences or removing original CDR or framework nucleic acid sequences.

[0494] Nucleic acid cassettes can be cloned into any suitable vector for expression of a portion or the entire light or heavy chain sequence containing the targeted amino acid substitutions generated. According to methods detailed in the invention, the nucleic acid cassette is cloned into a vector allowing production of a portion or the entire light or heavy chain sequence fused to all or a portion of a viral coat protein (i.e., creating a fusion protein) and displayed on the surface of a particle or cell. While several types of vectors are available and may be used to practice this invention, phagemid vectors are convenient, as they may be constructed with relative ease, and can be readily amplified. Phagemid vectors generally contain a variety of components including promoters, signal sequences, phenotypic selection genes, origin of replication sites, and other necessary components as are known to those of ordinary skill in the art.

[0495] In another embodiment, wherein a particular variant amino acid combination is to be expressed, the nucleic acid cassette contains a sequence that is able to encode all or a portion of the heavy or light chain variable domain, and is able to encode the variant amino acid combinations. For production of antibodies containing these variant amino acids or combinations of variant amino acids, as in a library, the nucleic acid cassettes can be inserted into an expression vector containing additional antibody sequence, for example all or portions of the variable or constant domains of the light and heavy chain variable regions. These additional antibody sequences can also be fused to other nucleic acid sequences, such as sequences which encode viral coat protein components and therefore allow production of a fusion protein.

[0496] Vectors

[0497] One aspect of the invention includes a replicable expression vector comprising a nucleic acid sequence encoding a gene fusion, wherein the gene fusion encodes a fusion protein comprising a CDR-containing polypeptide (such as an antibody variable domain), or an antibody variable domain and a constant domain, fused to all or a portion of a viral coat protein. Also included is a library of diverse replicable expression vectors comprising a plurality of gene fusions encoding a plurality of different fusion proteins including a plurality of the fusion polypeptides generated with diverse sequences as described above. The vectors can include a variety of components and may be constructed to allow for movement of antibody variable domain between different vectors and /or to provide for display of the fusion proteins in different formats.

[0498] Examples of vectors include phage vectors and phagemid vectors (which illustrated herein, and described in greater detail above). A phage vector generally has a phage origin of replication allowing phage replication and phage particle formation. The phage is generally a filamentous bacteriophage, such as an M13, f1, fd, Pf3 phage or a derivative thereof, or a lambdoid phage, such as lambda, 21, phi80, phi81, 82, 424, 434, etc., or a derivative thereof.

[0499] Examples of viral coat proteins include infectivity protein PIII (sometimes also designated p3), major coat protein PVIII, Soc (T4), Hoc (T4), gpD (of bacteriophage lambda), minor bacteriophage coat protein 6 (pVI) (filamentous phage; J Immunol Methods. Dec. 10, 1999;231(1-2):39-51), variants of the M13 bacteriophage major coat protein (P8) (Protein Sci 2000 April;9(4):647-54). The fusion protein can be displayed on the surface of a phage and suitable phage systems include M13KO7 helper phage, M13R408, M13-VCS, and Phi X 174, pJuFo phage system (J Virol. 2001 August;75(15):7107-13.v), hyperphage (Nat Biotechnol. 2001 January; 19(1):75-8). In certain embodiments, the helper phage is M13KO7, and the coat protein is the M13 Phage gene III coat protein. In certain embodiments, the host is E. coli, and protease deficient strains of E. coli. Vectors, such as the fth1 vector (Nucleic Acids Res. 2001 May 15;29(10):E50-0) can be useful for the expression of the fusion protein.

[0500] The expression vector also can have a secretory signal sequence fused to the DNA encoding a CDR-containing fusion polypeptide (e.g., each subunit of an antibody, or fragment thereof). This sequence is typically located immediately 5′ to the gene encoding the fusion protein, and will thus be transcribed at the amino terminus of the fusion protein. However, in certain cases, the signal sequence has been demonstrated to be located at positions other than 5′ to the gene encoding the protein to be secreted. This sequence targets the protein to which it is attached across the inner membrane of the bacterial cell. The DNA encoding the signal sequence may be obtained as a restriction endonuclease fragment from any gene encoding a protein that has a signal sequence. Suitable prokaryotic signal sequences may be obtained from genes encoding, for example, LamB or OmpF (Wong et al., Gene, 68:1931 (1983), MalE, PhoA and other genes. In one embodiment, a prokaryotic signal sequence for practicing this invention is the E. coli heat-stable enterotoxin II (STII) signal sequence as described by Chang et al., Gene 55:189 (1987), and/or malE.

[0501] As indicated above, a vector also typically includes a promoter to drive expression of the fusion polypeptide. Promoters most commonly used in prokaryotic vectors include the lac Z promoter system, the alkaline phosphatase pho A promoter (Ap), the bacteriophage l_{PL} promoter (a temperature sensitive promoter), the tac promoter (a hybrid trp-lac promoter that is regulated by the lac repressor), the tryptophan promoter, and the bacteriophage T7 promoter. For general descriptions of promoters, see section 17 of Sambrook et al. supra. While these are the most commonly used promoters, other suitable promoters may be used as well.

[0502] The vector can also include other nucleic acid sequences, for example, sequences encoding gD tags, c-Myc epitopes, poly-histidine tags, fluorescence proteins (e.g., GFP), or beta-galactosidase protein which can be useful for detection or purification of the fusion protein expressed on the surface of the phage or cell. Nucleic acid sequences encoding, for example, a gD tag, also provide for positive or negative selection of cells or virus expressing the fusion protein. In some embodiments, the gD tag is fused to an antibody variable domain which is not fused to the viral coat protein component. Nucleic acid sequences encoding, for example, a polyhistidine tag, are useful for identifying fusion proteins including antibody variable domains that bind to a specific antigen using immunohistochemistry. Tags useful for detection of antigen binding can be fused to either an antibody variable domain not fused to a viral coat protein component or an antibody variable domain fused to a viral coat protein component.

[0503] Another useful component of the vectors used to practice this invention is phenotypic selection genes. Typical phenotypic selection genes are those encoding proteins that confer antibiotic resistance upon the host cell. By way of illustration, the ampicillin resistance gene (ampr), and the tetracycline resistance gene (tetr) are readily employed for this purpose.

[0504] The vector can also include nucleic acid sequences containing unique restriction sites and suppressible stop codons. The unique restriction sites are useful for moving antibody variable domains between different vectors and expression systems, especially useful for production of full-length antibodies or antigen binding fragments in cell cultures. The suppressible stop codons are useful to control the level of expression of the fusion protein and to facilitate purification of soluble antibody fragments. For example, an amber stop codon can be read as Gln in a supE host to enable phage display, while in a non-supE host it is read as a stop codon to produce soluble antibody fragments without fusion to phage coat proteins. These synthetic sequences can be fused to one or more antibody variable domains in the vector.

[0505] It is sometimes beneficial to use vector systems that allow the nucleic acid encoding an antibody sequence of interest, for example a CDR having variant amino acids, to be easily removed from the vector system and placed into another vector system. For example, appropriate restriction sites can be engineered in a vector system to facilitate the removal of the nucleic acid sequence encoding an antibody or antibody variable domain having variant amino acids. The restriction sequences are usually chosen to be unique in the vectors to facilitate efficient excision and ligation into new vectors. Antibodies or antibody variable domains can then be expressed from vectors without extraneous fusion sequences, such as viral coat proteins or other sequence tags.

[0506] Between nucleic acid encoding antibody variable or constant domain (gene 1) and the viral coat protein component (gene 2), DNA encoding a termination or stop codon may be inserted, such termination codons including UAG (amber), UAA (ocher) and UGA (opel). (Microbiology, Davis et al., Harper & Row, New York, 1980, pp. 237, 245-47 and 374). The termination or stop codon expressed in a wild type host cell results in the synthesis of the gene 1 protein product without the gene 2 protein attached. However, growth in a suppressor host cell results in the synthesis of detectable quantities of fused protein. Such suppressor host cells are well known and described, such as E. coli suppressor strain (Bullock et al., BioTechniques 5:376-379 (1987)). Any acceptable method may be used to place such a termination codon into the mRNA encoding the fusion polypeptide.

[0507] The suppressible codon may be inserted between the first gene encoding an antibody variable or constant domain, and a second gene encoding at least a portion of a phage coat protein. Alternatively, the suppressible termination codon may be inserted adjacent to the fusion site by replacing the last amino acid triplet in the antibody variable domain or the first amino acid in the phage coat protein. The suppressible termination codon may be located at or after the C-terminal end of a dimerization domain. When the plasmid containing the suppressible codon is grown in a suppressor host cell, it results in the detectable production of a fusion polypeptide containing the polypeptide and the coat protein. When the plasmid is grown in a non-suppressor host cell, the antibody variable domain is synthesized substantially without fusion to the phage coat protein due to termination at the inserted suppressible triplet UAG, UAA, or UGA. In the non-suppressor cell the antibody variable domain is synthesized and secreted from the host cell due to the absence of the fused phage coat protein which otherwise anchored it to the host membrane.

[0508] In some embodiments, the CDR being diversified (randomized) may have a stop codon engineered in the template sequence (referred to herein as a “stop template”). This feature provides for detection and selection of successfully diversified sequences based on successful repair of the stop codon(s) in the template sequence due to incorporation of the oligonucleotide(s) comprising the sequence(s) for the variant amino acids of interest. This feature is further illustrated in the Examples below.

[0509] The light and/or heavy chain antibody variable or constant domains can also be fused to an additional peptide sequence, the additional peptide sequence providing for the interaction of one or more fusion polypeptides on the surface of the viral particle or cell. These peptide sequences are herein referred to as “dimerization domains”. Dimerization domains may comprise at least one or more of a dimerization sequence, or at least one sequence comprising a cysteine residue or both. Suitable dimerization sequences include those of proteins having amphipathic alpha helices in which hydrophobic residues are regularly spaced and allow the formation of a dimer by interaction of the hydrophobic residues of each protein; such proteins and portions of proteins include, for example, leucine zipper regions. Dimerization domains can also comprise one or more cysteine residues (e.g. as provided by inclusion of an antibody hinge sequence within the dimerization domain). The cysteine residues can provide for dimerization by formation of one or more disulfide bonds. In one embodiment, wherein a stop codon is present after the dimerization domain, the dimerization domain comprises at least one cysteine residue. In some embodiments, the dimerization domains are located between the antibody variable or constant domain and the viral coat protein component.

[0510] In some cases the vector encodes a single antibody-phage polypeptide in a single chain form containing, for example, both the heavy and light chain variable regions fused to a coat protein. In these cases the vector is considered to be “monocistronic”, expressing one transcript under the control of a certain promoter. For example, a vector may utilize a promoter (such as the alkaline phosphatase (AP) or Tac promoter) to drive expression of a monocistronic sequence encoding VL and VH domains, with a linker peptide between the VL and VH domains. This cistronic sequence may be connected at the 5′ end to a signal sequence (such as an E. coli malE or heat-stable enterotoxin II (STII) signal sequence) and at its 3′ end to all or a portion of a viral coat protein (such as the bacteriophage pIII protein). The fusion polypeptide encoded by a vector of this embodiment is referred to herein as “ScFv-pIII”. In some embodiments, a vector may further comprise a sequence encoding a dimerization domain (such as a leucine zipper) at its 3′ end, between the second variable domain sequence (e.g., VH) and the viral coat protein sequence. Fusion polypeptides comprising the dimerization domain are capable of dimerizing to form a complex of two scFv polypeptides (referred to herein as “(ScFv)2-pIII)”).

[0511] In other cases, the variable regions of the heavy and light chains can be expressed as separate polypeptides, the vector thus being “bicistronic”, allowing the expression of separate transcripts. In these vectors, a suitable promoter, such as the Ptac or PhoA promoter, is used to drive expression of a bicistronic message. A first cistron encoding, for example, a light chain variable and constant domain, may be connected at the 5′ end to a signal sequence, such as E. coli malE or heat-stable enterotoxin II (STII) signal sequence, and at the 3′ end to a nucleic acid sequence encoding a tag sequence, such as gD tag. A second cistron, encoding, for example, a heavy chain variable domain and constant domain CH1, is connected at its 5′ end to a signal sequence, such as E. coli malE or heat-stable enterotoxin II (STII) signal sequence, and at the 3′ end to all or a portion of a viral coat protein.

[0512] In one embodiment of a vector which provides a bicistronic message and for display of F(ab′)₂-pIII, a suitable promoter, such as Ptac or PhoA (AP) promoter, drives expression of a first cistron encoding a light chain variable and constant domain operably linked at 5′ end to a signal sequence such as the E. coli malE or heat stable enteroxtoxin II (STII) signal sequence, and at the 3′ end to a nucleic acid sequence encoding a tag sequence such as gD tag. The second cistron encodes, for example, a heavy chain variable and constant domain operatively linked at 5′ end to a signal sequence such as E. coli malE or heat stable enterotoxin II (STII) signal sequence, and at 3′ end has a dimerization domain comprising IgG hinge sequence and a leucine zipper sequence followed by at least a portion of viral coat protein.

[0513] Display of Fusion Polypeptides

[0514] Fusion polypeptides of a CDR-containing polypeptide (for example, an antibody variable domain) can be displayed on the surface of a cell, virus, or phagemid particle in a variety of formats. These formats include single chain Fv fragment (scFv), F(ab) fragment and multivalent forms of these fragments. For example, multivalent forms include a dimer of ScFv, Fab, or F(ab′), herein referred to as (ScFv)₂, F(ab)₂ and F(ab′)₂, respectively. The multivalent forms of display are advantageous in some contexts in part because they have more than one antigen binding site which generally results in the identification of lower affinity clones and also allows for more efficient sorting of rare clones during the selection process.

[0515] Methods for displaying fusion polypeptides comprising antibody fragments, on the surface of bacteriophage, are well known in the art, for example as described in patent publication number WO 92/01047 and herein. Other patent publications WO 92/20791; WO 93/06213; WO 93/11236 and WO 93/19172, describe related methods and are all herein incorporated by reference. Other publications have shown the identification of antibodies with artificially rearranged V gene repertoires against a variety of antigens displayed on the surface of phage (for example, H. R. Hoogenboom & G. Winter, J. Mol. Biol. 227 381-388 (1992); and as disclosed in WO 93/06213 and WO 93/11236).

[0516] When a vector is constructed for display in a scFv format, it includes nucleic acid sequences encoding an antibody variable light chain domain and an antibody variable heavy chain variable domain. Typically, the nucleic acid sequence encoding an antibody variable heavy chain domain is fused to a viral coat protein component. One or both of the antibody variable domains can have variant amino acids in at least one CDR region. The nucleic acid sequence encoding the antibody variable light chain is connected to the antibody variable heavy chain domain by a nucleic acid sequence encoding a peptide linker. The peptide linker typically contains about 5 to 15 amino acids. Optionally, other sequences encoding, for example, tags useful for purification or detection can be fused at the 3′ end of either the nucleic acid sequence encoding the antibody variable light chain or antibody variable heavy chain domain or both.

[0517] When a vector is constructed for F(ab) display, it includes nucleic acid sequences encoding antibody variable domains and antibody constant domains. A nucleic acid encoding a variable light chain domain is fused to a nucleic acid sequence encoding a light chain constant domain. A nucleic acid sequence encoding an antibody heavy chain variable domain is fused to a nucleic acid sequence encoding a heavy chain constant CH1 domain. Typically, the nucleic acid sequence encoding the heavy chain variable and constant domains are fused to a nucleic acid sequence encoding all or part of a viral coat protein. One or both of the antibody variable light or heavy chain domains can have variant amino acids in at least one CDR. In some embodiments, the heavy chain variable and constant domains are expressed as a fusion with at least a portion of a viral coat protein, and the light chain variable and constant domains are expressed separately from the heavy chain viral coat fusion protein. The heavy and light chains associate with one another, which may be by covalent or non-covalent bonds. Optionally, other sequences encoding, for example, polypeptide tags useful for purification or detection, can be fused at the 3′ end of either the nucleic acid sequence encoding the antibody light chain constant domain or antibody heavy chain constant domain or both.

[0518] In some embodiments, a bivalent moiety, for example, a F(ab)₂ dimer or F(ab′)₂ dimer, is used for displaying antibody fragments with the variant amino acid substitutions on the surface of a particle. It has been found that F(ab′)₂ dimers generally have the same affinity as F(ab) dimers in a solution phase antigen binding assay but the off rate for F(ab′)₂ are reduced because of a higher avidity. Therefore, the bivalent format (for example, F(ab′)₂) is a particularly useful format since it can allow for the identification of lower affinity clones and also allows more efficient sorting of rare clones during the selection process.

[0519] Introduction of Vectors into Host Cells

[0520] Vectors constructed as described in accordance with the invention are introduced into a host cell for amplification and/or expression. Vectors can be introduced into host cells using standard transformation methods including electroporation, calcium phosphate precipitation and the like. If the vector is an infectious particle such as a virus, the vector itself provides for entry into the host cell. Transfection of host cells containing a replicable expression vector which encodes the gene fusion and production of phage particles according to standard procedures provides phage particles in which the fusion protein is displayed on the surface of the phage particle.

[0521] Replicable expression vectors are introduced into host cells using a variety of methods. In one embodiment, vectors can be introduced into cells using electroporation as described in WO/00106717. Cells are grown in culture in standard culture broth, optionally for about 6-48 hours (or to OD₆₀₀=0.6-0.8) at about 37° C., and then the broth is centrifuged and the supernatant removed (e.g. decanted). In some embodiments, initial purification includes resuspending the cell pellet in a buffer solution (e.g. 1.0 mM HEPES pH 7.4) followed by recentrifugation and removal of supernatant. The resulting cell pellet is resuspended in dilute glycerol (e.g. 5-20% v/v) and again recentrifuged to form a cell pellet and the supernatant removed. The final cell concentration is obtained by resuspending the cell pellet in water or dilute glycerol to the desired concentration.

[0522] In certain embodiments, the recipient cell is the electroporation competent E. coli strain of the present invention, which is E. coli strain SS320 (Sidhu et al., Methods Enzymol. (2000), 328:333-363). Strain SS320 was prepared by mating MC1061 cells with XL1-BLUE cells under conditions sufficient to transfer the fertility episome (F′ plasmid) or XL1-BLUE into the MC1061 cells. Strain SS320 has been deposited with the American Type Culture Collection (ATCC), 10801 University Boulevard, Manassas, Va. USA, on Jun. 18, 1998 and assigned Deposit Accession No. 98795. Any F′ episome which enables phage replication in the strain may be used in the invention. Suitable episomes are available from strains deposited with ATCC or are commercially available (CJ236, CSH18, DHF′, JM101, JM103, JM105, JM107, JM109, JM110), KS1000, XL1-BLUE, 71-18 and others).

[0523] The use of higher DNA concentrations during electroporation (about 10×) increases the transformation efficiency and increases the amount of DNA transformed into the host cells. The use of high cell concentrations also increases the efficiency (about 10×). The larger amount of transferred DNA produces larger libraries having greater diversity and representing a greater number of unique members of a combinatorial library. Transformed cells are generally selected by growth on antibiotic containing medium.

[0524] Selection (Sorting) and Screening for Binders to Targets of Choice

[0525] Use of phage display for identifying target antigen binders, with its various permutations and variations in methodology, are well established in the art. One approach involves constructing a family of variant replicable vectors containing a transcription regulatory element operably linked to a gene fusion encoding a fusion polypeptide, transforming suitable host cells, culturing the transformed cells to form phage particles which display the fusion polypeptide on the surface of the phage particle, followed by a process that entails selection or sorting by contacting the recombinant phage particles with a target antigen so that at least a portion of the population of particles bind to the target with the objective to increase and enrich the subsets of the particles which bind from particles relative to particles that do not bind in the process of selection. The selected pool can be amplified by infecting host cells, such as fresh XL1-Blue cells, for another round of sorting on the same target with different or same stringency. The resulting pool of variants are then screened against the target antigens to identify novel high affinity binding proteins. These novel high affinity binding proteins can be useful as therapeutic agents as antagonists or agonists, and/or as diagnostic and research reagents.

[0526] Fusion polypeptides such as antibody variable domains comprising the variant amino acids can be expressed on the surface of a phage, phagemid particle or a cell and then selected and/or screened for the ability of members of the group of fusion polypeptides to bind a target antigen which is typically an antigen of interest. The processes of selection for binders to target can also be include sorting on a generic protein having affinity for antibody variable domains such as protein L or a tag specific antibody which binds to antibody or antibody fragments displayed on phage, which can be used to enrich for library members that display correctly folded antibody fragments (fusion polypeptides).

[0527] Target proteins, such as receptors, may be isolated from natural sources or prepared by recombinant methods by procedures known in the art. Target antigens can include a number of molecules of therapeutic interest.

[0528] A variety of strategies of selection (sorting) for affinity can be used. One example is a solid-support method or plate sorting or immobilized target sorting. Another example is a solution-binding method.

[0529] For the solid support method, the target protein may be attached to a suitable solid or semi solid matrix. Such matrices are known in the art, such as agarose beads, acrylamide beads, glass beads, cellulose, various acrylic copolymers, hydroxyalkyl methacrylate gels, polyacrylic and polymethacrylic copolymers, nylon, neutral and ionic carriers, and the like. Attachment of the target protein to the matrix may be accomplished by methods described, e.g., in Methods in Enzymology, 44 (1976), or by other means known in the art.

[0530] After attachment of the target antigen to the matrix, the immobilized target is contacted with the library expressing the fusion polypeptides under conditions suitable for binding of at least a subset of the phage particle population with the immobilized target antigen. Normally, the conditions, including pH, ionic strength, temperature and the like will mimic physiological conditions. Bound particles (“binders”) to the immobilized target are separated from those particles that do not bind to the target by washing. Wash conditions can be adjusted to result in removal of all but the high affinity binders. Binders may be dissociated from the immobilized target by a variety of methods. These methods include competitive dissociation using the wild-type ligand (e.g. excess target antigen), altering pH and/or ionic strength, and methods known in the art. Selection of binders typically involves elution from an affinity matrix with a suitable elution material such as acid like 0.1M HCl or ligand. Elution with increasing concentrations of ligand could elute displayed binding molecules of increasing affinity.

[0531] The binders can be isolated and then re-amplified in suitable host cells by infecting the cells with the viral particles that are binders (and helper phage if necessary, e.g., when the viral particle is a phagemid particle) and the host cells are cultured under conditions suitable for amplification of the particles that display the desired fusion polypeptide. The phage particles are then collected and the selection process is repeated one or more times until binders of the target antigen are enriched. Any number of rounds of selection or sorting can be utilized. One of the selection or sorting procedures can involve isolating binders that bind to a generic affinity protein such as protein L or an antibody to a polypeptide tag present in a displayed polypeptide such as antibody to the gD protein or polyhistidine tag. Counterselection may be included in one or more rounds of selection or sorting to isolate binders that also exhibit undesired binding to one or more non-target antigens.

[0532] One aspect of the invention involves selection against libraries of the invention using a novel selection method which is termed “solution-binding method”. The invention allows solution phase sorting with much improved efficiency over conventional solution sorting methods. The solution binding method may be used for finding original binders from a random library or finding improved binders from a library that was designated to improve affinity of a particular binding clone or group of clones. The method comprises contacting a plurality of polypeptides, such as those displayed on phage or phagemid particles (library), with a target antigen labeled or fused with a tag molecule. The tag could be biotin or other moieties for which specific binders are available. The stringency of the solution phase can be varied by using decreasing concentrations of labeled target antigen in the first solution binding phase. To further increase the stringency, the first solution binding phase can be followed by a second solution phase having high concentration of unlabelled target antigen after the initial binding with the labeled target in the first solution phase. Usually, 100 to 1000 fold of unlabelled target over labeled target is used in the second phase (if included). The length of time of incubation of the first solution phase can vary from a few minutes to one to two hours or longer to reach equilibrium. Using a shorter time for binding in this first phase may bias or select for binders that have fast on-rate. The length of time and temperature of incubation in second phase can be varied to increase the stringency. This provides for a selection bias for binders that have slow rate of coming off the target (off-rate). After contacting the plurality of polypeptides (displayed on the phage/phagemid particles) with a target antigen, the phage or phagemid particles that are bound to labeled targets are separated from phage that do not bind. The particle-target mixture from solution phase of binding is isolated by contacting it with the labeled target moiety and allowing for its binding to, a molecule that binds the labeled target moiety for a short period of time (e.g., 2-5 minutes). The initial concentration of the labeled target antigen can range from about 0.1 nM to about 1000 nM. The bound particles are eluted and can be propagated for next round of sorting. In certain embodiments, multiple rounds of sorting are performed using a lower concentration of labeled target antigen with each round of sorting.

[0533] For example, an initial sort or selection using about 100 to 250 nM labeled target antigen should be sufficient to capture a wide range of affinities, although this factor can be determined empirically and/or to suit the desire of the practitioner. In the second round of selection, about 25 to 100 nM of labeled target antigen may be used. In the third round of selection, about 0.1 to 25 nM of labeled target antigen may be used. For example, to improve the affinity of a 100 nM binder, it may be desirable to start with 20 nM and then progress to 5 and 1 nM labeled target, then, followed by even lower concentrations such as about 0.1 nM labeled target antigen.

[0534] The conventional solution sorting involves use of beads like streptavidin-coated beads, which is very cumbersome to use and often results in very low efficiency of phage binder recovery. The conventional solution sorting with beads takes much longer than 2-5 minutes and is less feasible to adapt to high throughput automation than the invention described above.

[0535] As described herein, combinations of solid support and solution sorting methods can be advantageously used to isolate binders having desired characteristics. After selection/sorting on target antigen for a few rounds, screening of individual clones from the selected pool generally is performed to identify specific binders with the desired properties/ characteristics. In some embodiments, the process of screening is carried out by automated systems to allow for high-throughput screening of library candidates.

[0536] Two major screening methods are described below. However, other methods known in the art may also be used in the methods of the invention. The first screening method comprises a phage ELISA assay with immobilized target antigen, which provides for identification of a specific binding clone from a non-binding clone. Specificity can be determined by simultaneous assay of the clone on target coated well and BSA or other non-target protein coated wells. This assay is automatable for high throughput screening.

[0537] One embodiment provides a method of selecting for an antibody variable domain that binds to a specific target antigen from a library of antibody variable domain by generating a library of replicable expression vectors comprising a plurality of polypeptides; contacting the library with a target antigen and at least one nontarget antigen under conditions suitable for binding; separating the polypeptide binders in the library from the nonbinders; identifying the binders that bind to the target antigen and do not bind to the nontarget antigen; eluting the binders from the target antigen; and amplifying the replicable expression vectors comprising the polypeptide binder that bind to a specific antigen.

[0538] The second screening assay is an affinity screening assay that provides for screening for clones that have high affinity from clones that have low affinity in a high throughput manner. In the assay, each clone is assayed with and without first incubating with target antigen of certain concentration for a period of time (e.g., 30-60 minutes) before application to target coated wells briefly (e.g., 5-15 minutes). Then bound phage is measured by usual phage ELISA method, e.g. using anti-M13 HRP conjugates. The ratio of binding signal of the two wells, one well having been preincubated with target and the other well not preincubated with target antigen is an indication of affinity. The selection of the concentration of target for first incubation depends on the affinity range of interest. For example, if binders with affinity higher than 10 nM are desired, 100 nM of target in the first incubation is often used. Once binders are found from a particular round of sorting (selection), these clones can be screened with an affinity screening assay to identify binders with higher affinity.

[0539] Combinations of any of the sorting/selection methods described above may be combined with the screening methods. For example, in one embodiment, polypeptide binders are first selected for binding to immobilized target antigen. Polypeptide binders that bind to the immobilized target antigen can then be amplified and screened for binding to the target antigen and for lack of binding to nontarget antigens. Polypeptide binders that bind specifically to the target antigen are amplified. These polypeptide binders can then selected for higher affinity by contact with a concentration of a labeled target antigen to form a complex, wherein the concentration ranges of labeled target antigen from about 0.1 nM to about 1000 nM, the complexes are isolated by contact with an agent that binds to the label on the target antigen. The polypeptide binders are then elited from the labeled target antigen and optionally, the rounds of selection are repeated, each time a lower concentration of labeled target antigen is used. The high affinity polypeptide binders isolated using this selection method can then be screened for high affinity using a variety of methods known in the art, some of which are described herein.

[0540] These methods can provide for finding clones with high affinity without having to perform long and complex competition affinity assays on a large number of clones. The intensive aspect of doing complex assays of many clones often is a significant obstacle to finding best clones from a selection. This method is especially useful in affinity improvement efforts where multiple binders with similar affinity can be recovered from the selection process. Different clones may have very different efficiency of expression/display on phage or phagemid particles. Those clones more highly expressed have better chances being recovered. That is, the selection can be biased by the display or expression level of the variants. The solution-binding sorting method of the invention can improve the selection process for finding binders with high affinity. This method is an affinity screening assay that provides a significant advantage in screening for the best binders quickly and easily.

[0541] After binders are identified by binding to the target antigen, the nucleic acid can be extracted. Extracted DNA can then be used directly to transform E. coli host cells or alternatively, the encoding sequences can be amplified, for example using PCR with suitable primers, and sequenced by any typical sequencing method. Variable domain DNA of the binders can be restriction enzyme digested and then inserted into a vector for protein expression.

[0542] Populations comprising polypeptides having CDR(s) with restricted sequence diversity generated according to methods of the invention can be used to isolate binders against a variety of targets, including those listed in FIGS. 10, 14A-C, 15A-B, 21-25A, and 28-32A. These binders may comprise one or more variant CDRs comprising diverse sequences generated using restricted codons. In some embodiments, a variant CDR is CDRH3 comprising sequence diversity generated by amino acid substitution with restricted codon sets and/or amino acid insertions resulting from varying CDRH3 lengths. Illustrative oligonucleotides useful for generating fusion polypeptides of the invention include those listed in FIGS. 8A and 8B, 12A-12D, 19A-L, and 27. One or more variant CDRs may be combined. In some embodiments, only CDRH3 is diversified. In other embodiments, two or more heavy chain CDRs, including CDRH3, are variant. In other embodiments, one or more heavy chain CDRs, excluding CDRH3, are variant. In some embodiments, at least one heavy chain and at least one light chain CDR are variant. In some embodiments, at least one, two, three, four, five or all of CDRs H1, H2, H3, L1, L2 and L3 are variant.

[0543] In some cases, it can be beneficial to combine one or more diversified light chain CDRs with novel binders isolated from a population of polypeptides comprising one or more diversified heavy chain CDRs. This process may be referred to as a 2-step process. An example of a 2-step process comprises first determining binders (generally lower affinity binders) within one or more libraries generated by randomizing one or more CDRs, wherein the CDRs randomized in each library are different or, where the same CDR is randomized, it is randomized to generate different sequences. Binders from a heavy chain library can then be randomized with CDR diversity in a light chain CDRs by, for example, a mutagenesis technique such as that of Kunkel, or by cloning (cut-and-paste (e.g. by ligating different CDR sequences together)) the new light chain library into the existing heavy chain binders that has only a fixed light chain. The pool can then be further sorted against one or more targets to identify binders possessing increased affinity. For example, binders (for example, low affinity binders) obtained from sorting an H1/H2/H3 may be fused with library of an L1/L2/L3 diversity to replace its original fixed L1/L2/L3, wherein the new libraries are then further sorted against a target of interest to obtain another set of binders (for example, high affinity binders). Novel antibody sequences can be identified that display higher binding affinity to any of a variety of target antigens.

[0544] In some embodiments, libraries comprising polypeptides of the invention are subjected to a plurality of sorting rounds, wherein each sorting round comprises contacting the binders obtained from the previous round with a target antigen distinct from the target antigen(s) of the previous round(s). Preferably, but not necessarily, the target antigens are homologous in sequence, for example members of a family of related but distinct polypeptides, such as, but not limited to, cytokines (for example, alpha interferon subtypes).

[0545] Generation of Libraries Comprising Variant CDR-Containing Polypeptides Libraries of variant CDR polypeptides can be generated by mutating the solvent accessible and/or highly diverse positions in at least one CDR of an antibody variable domain. Some or all of the CDRs can be mutated using the methods of the invention. In some embodiments, it may be preferable to generate diverse antibody libraries by mutating positions in CDRH1, CDRH2 and CDRH3 to form a single library or by mutating positions in CDRL3 and CDRH3 to form a single library or by mutating positions in CDRL3 and CDRH1, CDRH2 and CDRH3 to form a single library.

[0546] A library of antibody variable domains can be generated, for example, having mutations in the solvent accessible and/or highly diverse positions of CDRH1, CDRH2 and CDRH3. Another library can be generated having mutations in CDRL1, CDRL2 and CDRL3. These libraries can also be used in conjunction with each other to generate binders of desired affinities. For example, after one or more rounds of selection of heavy chain libraries for binding to a target antigen, a light chain library can be replaced into the population of heavy chain binders for further rounds of selection to increase the affinity of the binders.

[0547] In one embodiment, a library is created by substitution of original amino acids with a limited set of variant amino acids in the CDRH1, CDRH2, and/or CDRH3 region of the variable region of the heavy chain sequence and/or the CDRL3 region of the variable region of the light chain sequence. According to the invention, this library can contain a plurality of antibody sequences, wherein the sequence diversity is primarily in the CDRH3 region of the heavy chain sequence.

[0548] In one aspect, the library is created in the context of the humanized antibody 4D5 sequence, or the sequence of the framework amino acids of the humanized antibody 4D5 sequence. In certain embodiments, the library is created by substitution of at least residues 29-34 of CDRH1, residues 50, 52, 52a, 53-56, and 58 of CDRH2, residues 95-100, 100a, 100b, and 1000c of CDRH3, and residues 91-96 of CDRL3 with the amino acids set forth as shown in FIG. 7 for the “YS-C” library. In certain embodiments, the library is created by substitution of at least residues 29-34 of CDRH1, residues 50, 52, 52a, 53-56, and 58 of CDRH2, residues 95-100, 100a, 100b, and 100c of CDRH3, and residues 91-96 of CDRL3 with the amino acids set forth as shown in FIG. 7 for the “YS-D” library. In certain embodiments, the library is created by substitution of at least residues 28 and 30-33 of CDRH1, residues 50, 52-54, 56, and 58 of CDRH2, residues 95, 96, 97, 98, 99, 100, 100a, 100b, and 100c of CDRH3, and residues 91-94 and 96 of CDRL3 with the amino acids set forth as shown in FIG. 11 for the “YSGR-A” library. In certain embodiments, the library is created by substitution of at least residues 28 and 30-33 of CDRH1, residues 50, 52-54, 56, and 58 of CDRH2, residues 95, 96, 97, 98, 99, 100, 100a, 100b, and 100c of CDRH3, and residues 91-94 and 96 of CDRL3 with the amino acids set forth as shown in FIG. 11 for the “YSGR-B” library. In certain embodiments, the library is created by substitution of at least residues 28 and 30-33 of CDRH1, residues 50, 52-54, 56, and 58 of CDRH2, residues 95, 96, 97, 98, 99, 100, 100a, 100b, and 100c of CDRH3, and residues 91-94 and 96 of CDRL3 with the amino acids set forth as shown in FIG. 11 for the “YSGR-C” library. In certain embodiments, the library is created by substitution of at least residues 28 and 30-33 of CDRH1, residues 50, 52-54, 56, and 58 of CDRH2, residues 95, 96, 97, 98, 99, 100, 100a, 100b, and 100c of CDRH3, and residues 91-94 and 96 of CDRL3 with the amino acids set forth as shown in FIG. 11 for the “YSGR-D” library. Positions 100b or 100c may have a different alphabetical label depending on the length of CDRH3, but correspond to the last two amino acid positions before position 101. Examples of suitable oligonucleotide sequences include, but are not limited to, those listed in FIGS. 8A and 8B and FIGS. 12A-12D, and can be determined by one skilled in the art according to the criteria described herein.

[0549] In certain embodiments, the library is created by substitution of at least residues 28 and 30-33 of CDRH1, residues 50, 52, 53, 54, 56, and 58 of CDRH2, residues 95-100m of CDRH3, and residues 91-94 and 96 of CDRL3 with the amino acids set forth as shown in FIG. 18A for the “SAH3” library. In certain embodiments, the library is created by substitution of at least residues 28 and 30-33 of CDRH1, residues 50, 52, 53, 54, 56, and 58 of CDRH2, residues 95-100m of CDRH3, and residues 91-94 and 96 of CDRL3 with the amino acids set forth as shown in FIG. 18A for the “SCH3” library. In certain embodiments, the library is created by substitution of at least residues 28 and 30-33 of CDRH1, residues 50, 52, 53, 54, 56, and 58 of CDRH2, residues 95-100m of CDRH3, and residues 91-94 and 96 of CDRL3 with the amino acids set forth as shown in FIG. 18A for the “SFH3” library. In certain embodiments, the library is created by substitution of at least residues 28 and 30-33 of CDRH1, residues 50, 52, 53, 54, 56, and 58 of CDRH2, residues 95-100m of CDRH3, and residues 91-94 and 96 of CDRL3 with the amino acids set forth as shown in FIG. 18A for the “SGH3” library. In certain embodiments, the library is created by substitution of at least residues 28 and 30-33 of CDRH1, residues 50, 52, 53, 54, 56, and 58 of CDRH2, residues 95-100m of CDRH3, and residues 91-94 and 96 of CDRL3 with the amino acids set forth as shown in FIG. 18A for the “SIH3” library. In certain embodiments, the library is created by substitution of at least residues 28 and 30-33 of CDRH1, residues 50, 52, 53, 54, 56, and 58 of CDRH2, residues 95-100m of CDRH3, and residues 91-94 and 96 of CDRL3 with the amino acids set forth as shown in FIG. 18A for the “SLH3” library. Positions 100l or 100m may have a different alphabetical label depending on the length of CDRH3, but correspond to the last two amino acid positions before position 101. Examples of suitable oligonucleotide sequences include, but are not limited to, those listed in FIGS. 19A-19L, and can be determined by one skilled in the art according to the criteria described herein.

[0550] In certain embodiments, the library is created by substitution of at least residues 28 and 30-33 of CDRH1, residues 50, 52, 53, 54, 56, and 58 of CDRH2, residues 95-100m of CDRH3, and residues 91-94 and 96 of CDRL3 with the amino acids set forth as shown in FIG. 18B for the “SNH3” library. In certain embodiments, the library is created by substitution of at least residues 28 and 30-33 of CDRH1, residues 50, 52, 53, 54, 56, and 58 of CDRH2, residues 95-100m of CDRH3, and residues 91-94 and 96 of CDRL3 with the amino acids set forth as shown in FIG. 18B for the “SPH3” library. In certain embodiments, the library is created by substitution of at least residues 28 and 30-33 of CDRH1, residues 50, 52, 53, 54, 56, and 58 of CDRH2, residues 95-100m of CDRH3, and residues 91-94 and 96 of CDRL3 with the amino acids set forth as shown in FIG. 18B for the “SRH3” library. In certain embodiments, the library is created by substitution of at least residues 28 and 30-33 of CDRH1, residues 50, 52, 53, 54, 56, and 58 of CDRH2, residues 95-100m of CDRH3, and residues 91-94 and 96 of CDRL3 with the amino acids set forth as shown in FIG. 18B for the “STH3” library. In certain embodiments, the library is created by substitution of at least residues 28 and 30-33 of CDRH1, residues 50, 52, 53, 54, 56, and 58 of CDRH2, residues 95-100m of CDRH3, and residues 91-94 and 96 of CDRL3 with the amino acids set forth as shown in FIG. 18B for the “SWH3” library. In certain embodiments, the library is created by substitution of at least residues 28 and 30-33 of CDRH1, residues 50, 52, 53, 54, 56, and 58 of CDRH2, residues 95-100m of CDRH3, and residues 91-94 and 96 of CDRL3 with the amino acids set forth as shown in FIG. 18B for the “SYH3” library. Positions 100l or 100m may have a different alphabetical label depending on the length of CDRH3, but correspond to the last two amino acid positions before position 101. Examples of suitable oligonucleotide sequences include, but are not limited to, those listed in FIGS. 19A-19L, and can be determined by one skilled in the art according to the criteria described herein.

[0551] In certain embodiments, the library is created by substitution of at least residues 28 and 30-33 of CDRH1, residues 50, 52, 53, 54, 56, and 58 of CDRH2, residues 95-100m of CDRH3, and residues 91-94 and 96 of CDRL3 with the amino acids set forth as shown in FIG. 26 for the “SY” library. In certain embodiments, the library is created by substitution of at least residues 28 and 30-33 of CDRH1, residues 50, 52, 53, 54, 56, and 58 of CDRH2, residues 95-100m of CDRH3, and residues 91-94 and 96 of CDRL3 with the amino acids set forth as shown in FIG. 26 for the “SW” library. In certain embodiments, the library is created by substitution of at least residues 28 and 30-33 of CDRH1, residues 50, 52, 53, 54, 56, and 58 of CDRH2, residues 95-100m of CDRH3, and residues 91-94 and 96 of CDRL3 with the amino acids set forth as shown in FIG. 26 for the “SR” library. In certain embodiments, the library is created by substitution of at least residues 28 and 30-33 of CDRH1, residues 50, 52, 53, 54, 56, and 58 of CDRH2, residues 95-100m of CDRH3, and residues 91-94 and 96 of CDRL3 with the amino acids set forth as shown in FIG. 26 for the “SF” library. Positions 100l or 100m may have a different alphabetical label depending on the length of CDRH3, but correspond to the last two amino acid positions before position 101. Examples of suitable oligonucleotide sequences include, but are not limited to, those listed in FIG. 27, and can be determined by one skilled in the art according to the criteria described herein.

[0552] In certain embodiments, a library is created by pooling other libraries. In one embodiment, the “SXH3” library as used herein comprises the SAH3, SCH3, SFH3, SGH3, SIH3, SLH3, SNH3, SPH3, SRH3, STH3, SWH3, and SYH3 libraries. In another embodiment, the “SX-surface” library comprises the “SY”, “SW”, “SR”, and “SF” libraries.

[0553] In another embodiment, different CDRH3 designs are utilized to isolate high affinity binders and to isolate binders for a variety of epitopes. For diversity in CDRH3, multiple libraries can be constructed separately with different lengths of H3 and then combined to select for binders to target antigens. The range of lengths of CDRH3 generated in this library can be 10-21, 11-21, 12-21, 13-21, 14-21, 15-21, 16-21, 17-21, 18-21, 19-21, 20-21, amino acids, although lengths different from this can also be generated. Diversity can also be generated in CDRH1 and CDRH2, as indicated above. In one embodiment of a library, diversity in H1 and H2 is generated utilizing the oligonucleotides illustrated in FIGS. 8A and 8B, 12A-12D, 19A-L, and 27. Other oligonucleotides with varying sequences can also be used. Oligonucleotides can be used singly or pooled in any of a variety of combinations depending on practical needs and desires of the practitioner. In some embodiments, randomized positions in heavy chain CDRs include those listed in FIGS. 6, 7, 11, 18A, 18B, and 26.

[0554] Multiple libraries can be pooled and sorted using solid support selection and solution sorting methods as described herein. Multiple sorting strategies may be employed. For example, one variation involves sorting on target bound to a solid, followed by sorting for a tag that may be present on the fusion polypeptide (e.g. anti-gD tag) and followed by another sort on target bound to solid. Alternatively, the libraries can be sorted first on target bound to a solid surface, the eluted binders are then sorted using solution phase binding with decreasing concentrations of target antigen. Utilizing combinations of different sorting methods provides for minimization of selection of only highly expressed sequences and provides for selection of a number of different high affinity clones.

[0555] Of the binders isolated from the pooled libraries as described above, it has been discovered that in some instances affinity may be further improved by providing limited diversity in the light chain. Light chain diversity may be, but is not necessarily, generated by diversifying amino acid positions 91-96 in CDRL3, or a subset thereof. In one embodiment, the randomized positions are those listed in FIGS. 6, 7, 11, 18A, 18B, and 26.

[0556] High affinity binders isolated from the libraries of these embodiments are readily produced in bacterial and eukaryotic cell culture in high yield. The vectors can be designed to readily remove sequences such as gD tags, viral coat protein component sequence, and/or to add in constant region sequences to provide for production of full length antibodies or antigen binding fragments in high yield.

[0557] Any combination of codon sets and CDRs can be diversified according to methods of the invention.

Vectors, Host Cells and Recombinant Methods

[0558] For recombinant production of an antibody polypeptide of the invention, the nucleic acid encoding it is isolated and inserted into a replicable vector for further cloning (amplification of the DNA) or for expression. DNA encoding the antibody is readily isolated and sequenced using conventional procedures (e.g., by using oligonucleotide probes that are capable of binding specifically to genes encoding the heavy and light chains of the antibody). Many vectors are available. The choice of vector depends in part on the host cell to be used. Generally, host cells are of either prokaryotic or eukaryotic (generally mammalian) origin.

Generating Antibodies Using Prokaryotic Host Cells:

Vector Construction

[0559] Polynucleotide sequences encoding polypeptide components of the antibody of the invention can be obtained using standard recombinant techniques. Desired polynucleotide sequences may be isolated and sequenced from antibody producing cells such as hybridoma cells. Alternatively, polynucleotides can be synthesized using nucleotide synthesizer or PCR techniques. Once obtained, sequences encoding the polypeptides are inserted into a recombinant vector capable of replicating and expressing heterologous polynucleotides in prokaryotic hosts. Many vectors that are available and known in the art can be used for the purpose of the present invention. Selection of an appropriate vector will depend mainly on the size of the nucleic acids to be inserted into the vector and the particular host cell to be transformed with the vector. Each vector contains various components, depending on its function (amplification or expression of heterologous polynucleotide, or both) and its compatibility with the particular host cell in which it resides. The vector components generally include, but are not limited to: an origin of replication, a selection marker gene, a promoter, a ribosome binding site (RBS), a signal sequence, the heterologous nucleic acid insert and a transcription termination sequence.

[0560] In general, plasmid vectors containing replicon and control sequences which are derived from species compatible with the host cell are used in connection with these hosts. The vector ordinarily carries a replication site, as well as marking sequences which are capable of providing phenotypic selection in transformed cells. For example, E. coli is typically transformed using pBR322, a plasmid derived from an E. coli species. pBR322 contains genes encoding ampicillin (Amp) and tetracycline (Tet) resistance and thus provides easy means for identifying transformed cells. pBR322, its derivatives, or other microbial plasmids or bacteriophage may also contain, or be modified to contain, promoters which can be used by the microbial organism for expression of endogenous proteins. Examples of pBR322 derivatives used for expression of particular antibodies are described in detail in Carter et al., U.S. Pat. No. 5,648,237.

[0561] In addition, phage vectors containing replicon and control sequences that are compatible with the host microorganism can be used as transforming vectors in connection with these hosts. For example, bacteriophage such as λGEM.TM.-11 may be utilized in making a recombinant vector which can be used to transform susceptible host cells such as E. coli LE392.

[0562] The expression vector of the invention may comprise two or more promoter-cistron pairs, encoding each of the polypeptide components. A promoter is an untranslated regulatory sequence located upstream (5′) to a cistron that modulates its expression. Prokaryotic promoters typically fall into two classes, inducible and constitutive. Inducible promoter is a promoter that initiates increased levels of transcription of the cistron under its control in response to changes in the culture condition, e.g. the presence or absence of a nutrient or a change in temperature.

[0563] A large number of promoters recognized by a variety of potential host cells are well known. The selected promoter can be operably linked to cistron DNA encoding the light or heavy chain by removing the promoter from the source DNA via restriction enzyme digestion and inserting the isolated promoter sequence into the vector of the invention. Both the native promoter sequence and many heterologous promoters may be used to direct amplification and/or expression of the target genes. In some embodiments, heterologous promoters are utilized, as they generally permit greater transcription and higher yields of expressed target gene as compared to the native target polypeptide promoter.

[0564] Promoters suitable for use with prokaryotic hosts include the PhoA promoter, the β-galactamase and lactose promoter systems, a tryptophan (trp) promoter system and hybrid promoters such as the tac or the trc promoter. However, other promoters that are functional in bacteria (such as other known bacterial or phage promoters) are suitable as well. Their nucleotide sequences have been published, thereby enabling a skilled worker operably to ligate them to cistrons encoding the target light and heavy chains (Siebenlist et al. (1980) Cell 20: 269) using linkers or adaptors to supply any required restriction sites.

[0565] In one aspect of the invention, each cistron within the recombinant vector comprises a secretion signal sequence component that directs translocation of the expressed polypeptides across a membrane. In general, the signal sequence may be a component of the vector, or it may be a part of the target polypeptide DNA that is inserted into the vector. The signal sequence selected for the purpose of this invention should be one that is recognized and processed (i.e. cleaved by a signal peptidase) by the host cell. For prokaryotic host cells that do not recognize and process the signal sequences native to the heterologous polypeptides, the signal sequence is substituted by a prokaryotic signal sequence selected, for example, from the group consisting of the alkaline phosphatase, penicillinase, Ipp, or heat-stable enterotoxin II (STII) leaders, LamB, PhoE, PelB, OmpA and MBP. In one embodiment of the invention, the signal sequences used in both cistrons of the expression system are STII signal sequences or variants thereof.

[0566] In another aspect, the production of the immunoglobulins according to the invention can occur in the cytoplasm of the host cell, and therefore does not require the presence of secretion signal sequences within each cistron. In that regard, immunoglobulin light and heavy chains are expressed, folded and assembled to form functional immunoglobulins within the cytoplasm. Certain host strains (e.g., the E. coli trxB⁻ strains) provide cytoplasm conditions that are favorable for disulfide bond formation, thereby permitting proper folding and assembly of expressed protein subunits. Proba and Pluckthun Gene, 159:203 (1995).

[0567] The present invention provides an expression system in which the quantitative ratio of expressed polypeptide components can be modulated in order to maximize the yield of secreted and properly assembled antibodies of the invention. Such modulation is accomplished at least in part by simultaneously modulating translational strengths for the polypeptide components.

[0568] One technique for modulating translational strength is disclosed in Simmons et al., U.S. Pat. No. 5,840,523. It utilizes variants of the translational initiation region (TIR) within a cistron. For a given TIR, a series of amino acid or nucleic acid sequence variants can be created with a range of translational strengths, thereby providing a convenient means by which to adjust this factor for the desired expression level of the specific chain. TIR variants can be generated by conventional mutagenesis techniques that result in codon changes which can alter the amino acid sequence, although silent changes in the nucleotide sequence are preferred. Alterations in the TIR can include, for example, alterations in the number or spacing of Shine-Dalgarno sequences, along with alterations in the signal sequence. One method for generating mutant signal sequences is the generation of a “codon bank” at the beginning of a coding sequence that does not change the amino acid sequence of the signal sequence (i.e., the changes are silent). This can be accomplished by changing the third nucleotide position of each codon; additionally, some amino acids, such as leucine, serine, and arginine, have multiple first and second positions that can add complexity in making the bank. This method of mutagenesis is described in detail in Yansura et al. (1992) METHODS: A Companion to Methods in Enzymol. 4:151-158.

[0569] In certain embodiments, a set of vectors is generated with a range of TIR strengths for each cistron therein. This limited set provides a comparison of expression levels of each chain as well as the yield of the desired antibody products under various TIR strength combinations. TIR strengths can be determined by quantifying the expression level of a reporter gene as described in detail in Simmons et al. U.S. Pat. No. 5, 840,523. Based on the translational strength comparison, the desired individual TIRs are selected to be combined in the expression vector constructs of the invention.

[0570] Prokaryotic host cells suitable for expressing antibodies of the invention include Archaebacteria and Eubacteria, such as Gram-negative or Gram-positive organisms. Examples of useful bacteria include Escherichia (e.g., E. coli), Bacilli (e.g., B. subtilis), Enterobacteria, Pseudomonas species (e.g., P. aeruginosa), Salmonella typhimurium, Serratia marcescans, Klebsiella, Proteus, Shigella, Rhizobia, Vitreoscilla, or Paracoccus. In one embodiment, gram-negative cells are used. In one embodiment, E. coli cells are used as hosts for the invention. Examples of E. coli strains include strain W3110 (Bachmann, Cellular and Molecular Biology, vol. 2 (Washington, D.C.: American Society for Microbiology, 1987), pp. 1190-1219; ATCC Deposit No. 27,325) and derivatives thereof, including strain 33D3 having genotype W3110 ΔfhuA (ΔtonA) ptr3 lac Iq lacL8 ΔompTΔ(nmpc-fepE) degP41 kan^{R} (U.S. Pat. No. 5,639,635). Other strains and derivatives thereof, such as E. coli 294 (ATCC 31,446), E. coli B, E. coli_{ο}1776 (ATCC 31,537) and E. coli RV308 (ATCC 31,608) are also suitable. These examples are illustrative rather than limiting. Methods for constructing derivatives of any of the above-mentioned bacteria having defined genotypes are known in the art and described in, for example, Bass et al., Proteins, 8:309-314 (1990). It is generally necessary to select the appropriate bacteria taking into consideration replicability of the replicon in the cells of a bacterium. For example, E. coli, Serratia, or Salmonella species can be suitably used as the host when well known plasmids such as pBR322, pBR325, pACYC177, or pKN410 are used to supply the replicon. Typically the host cell should secrete minimal amounts of proteolytic enzymes, and additional protease inhibitors may desirably be incorporated in the cell culture.

Antibody Production

[0571] Host cells are transformed with the above-described expression vectors and cultured in conventional nutrient media modified as appropriate for inducing promoters, selecting transformants, or amplifying the genes encoding the desired sequences.

[0572] Transformation means introducing DNA into the prokaryotic host so that the DNA is replicable, either as an extrachromosomal element or by chromosomal integrant. Depending on the host cell used, transformation is done using standard techniques appropriate to such cells. The calcium treatment employing calcium chloride is generally used for bacterial cells that contain substantial cell-wall barriers. Another method for transformation employs polyethylene glycol/DMSO. Yet another technique used is electroporation.

[0573] Prokaryotic cells used to produce the polypeptides of the invention are grown in media known in the art and suitable for culture of the selected host cells. Examples of suitable media include luria broth (LB) plus necessary nutrient supplements. In some embodiments, the media also contains a selection agent, chosen based on the construction of the expression vector, to selectively permit growth of prokaryotic cells containing the expression vector. For example, ampicillin is added to media for growth of cells expressing ampicillin resistant gene.

[0574] Any necessary supplements besides carbon, nitrogen, and inorganic phosphate sources may also be included at appropriate concentrations introduced alone or as a mixture with another supplement or medium such as a complex nitrogen source. Optionally the culture medium may contain one or more reducing agents selected from the group consisting of glutathione, cysteine, cystamine, thioglycollate, dithioerythritol and dithiothreitol.

[0575] The prokaryotic host cells are cultured at suitable temperatures. For E. coli growth, for example, the temperature ranges from about 20° C. to about 39° C., from about 25° C. to about 37° C., and/or about 30° C. may be used. The pH of the medium may be any pH ranging from about 5 to about 9, depending mainly on the host organism. For E. coli, the pH can be about 6.8 to about 7.4, and can be about 7.0.

[0576] If an inducible promoter is used in the expression vector of the invention, protein expression is induced under conditions suitable for the activation of the promoter. In one aspect of the invention, PhoA promoters are used for controlling transcription of the polypeptides. Accordingly, the transformed host cells are cultured in a phosphate-limiting medium for induction. The phosphate-limiting medium can be C.R.A.P medium (see, e.g., Simmons et al., J. Immunol. Methods (2002), 263:133-147). A variety of other inducers may be used, according to the vector construct employed, as is known in the art.

[0577] In one embodiment, the expressed polypeptides of the present invention are secreted into and recovered from the periplasm of the host cells. Protein recovery typically involves disrupting the microorganism, generally by such means as osmotic shock, sonication or lysis. Once cells are disrupted, cell debris or whole cells may be removed by centrifugation or filtration. The proteins may be further purified, for example, by affinity resin chromatography. Alternatively, proteins can be transported into the culture media and isolated therein. Cells may be removed from the culture and the culture supernatant can be filtered and concentrated for further purification of the produced proteins. The expressed polypeptides can be further isolated and identified using commonly known methods such as polyacrylamide gel electrophoresis (PAGE) and Western blot assay.

[0578] In one aspect of the invention, antibody production is conducted in large quantity by a fermentation process. Various large-scale fed-batch fermentation procedures are available for production of recombinant proteins. Large-scale fermentations have at least 1000 liters of capacity; in certain embodiments, the large-scale fermentors have about 1,000 to 100,000 liters of capacity. These fermentors use agitator impellers to distribute oxygen and nutrients, especially glucose (a common carbon/energy source). Small scale fermentation refers generally to fermentation in a fermentor that is no more than approximately 100 liters in volumetric capacity, and can range from about 1 liter to about 100 liters.

[0579] In a fermentation process, induction of protein expression is typically initiated after the cells have been grown under suitable conditions to a desired density, e.g., an OD₅₅₀ of about 180-220, at which stage the cells are in the early stationary phase. A variety of inducers may be used, according to the vector construct employed, as is known in the art and described above. Cells may be grown for shorter periods prior to induction. Cells are usually induced for about 12-50 hours, although longer or shorter induction times may be used.

[0580] To improve the production yield and quality of the polypeptides of the invention, various fermentation conditions can be modified. For example, to improve the proper assembly and folding of the secreted antibody polypeptides, additional vectors overexpressing chaperone proteins, such as Dsb proteins (DsbA, DsbB, DsbC, DsbD and or DsbG) or FkpA (a peptidylprolyl cis,trans-isomerase with chaperone activity) can be used to co-transform the host prokaryotic cells. The chaperone proteins have been demonstrated to facilitate the proper folding and solubility of heterologous proteins produced in bacterial host cells. Chen et al. (1999) J Bio Chem 274:19601-19605; Georgiou et al., U.S. Pat. No. 6,083,715; Georgiou et al., U.S. Pat. No. 6,027,888; Bothmann and Pluckthun (2000) J. Biol. Chem. 275:17100-17105; Ramm and Pluckthun (2000) J. Biol. Chem. 275:17106-17113; Arie et al. (2001) Mol. Microbiol. 39:199-210.

[0581] To minimize proteolysis of expressed heterologous proteins (especially those that are proteolytically sensitive), certain host strains deficient for proteolytic enzymes can be used for the present invention. For example, host cell strains may be modified to effect genetic mutation(s) in the genes encoding known bacterial proteases such as Protease III, OmpT, DegP, Tsp, Protease I, Protease Mi, Protease V, Protease VI and combinations thereof. Some E. coli protease-deficient strains are available and described in, for example, Joly et al. (1998), supra; Georgiou et al., U.S. Pat. No. 5,264,365; Georgiou et al., U.S. Pat. No. 5,508,192; Hara et al., Microbial Drug Resistance, 2:63-72 (1996).

[0582] In one embodiment, E. coli strains deficient for proteolytic enzymes and transformed with plasmids overexpressing one or more chaperone proteins are used as host cells in the expression system of the invention.

Antibody Purification

[0583] In one embodiment, the antibody protein produced herein is further purified to obtain preparations that are substantially homogeneous for further assays and uses. Standard protein purification methods known in the art can be employed. The following procedures are exemplary of suitable purification procedures: fractionation on immunoaffinity or ion-exchange columns, ethanol precipitation, reverse phase HPLC, chromatography on silica or on a cation-exchange resin such as DEAE, chromatofocusing, SDS-PAGE, ammonium sulfate precipitation, and gel filtration using, for example, Sephadex G-75.

[0584] In one aspect, Protein A immobilized on a solid phase is used for immunoaffinity purification of the antibody products of the invention. Protein A is a 41 kD cell wall protein from Staphylococcus aureas which binds with a high affinity to the Fc region of antibodies. Lindmark et al (1983) J. Immunol. Meth. 62:1-13. In certain embodiments, the solid phase to which Protein A is immobilized is a column comprising a glass or silica surface. In certain embodiments, the solid phase to which Protein A is immobilized is a controlled pore glass column or a silicic acid column. In some applications, the column has been coated with a reagent, such as glycerol, in an attempt to prevent nonspecific adherence of contaminants.

[0585] As the first step of purification, the preparation derived from the cell culture as described above is applied onto the Protein A immobilized solid phase to allow specific binding of the antibody of interest to Protein A. The solid phase is then washed to remove contaminants non-specifically bound to the solid phase. Finally the antibody of interest is recovered from the solid phase by elution.

Generating Antibodies Using Eukaryotic Host Cells:

[0586] The vector components generally include, but are not limited to, one or more of the following: a signal sequence, an origin of replication, one or more marker genes, an enhancer element, a promoter, and a transcription termination sequence.

[0587] (i) Signal Sequence Component

[0588] A vector for use in a eukaryotic host cell may also contain a signal sequence or other polypeptide having a specific cleavage site at the N-terminus of the mature protein or polypeptide of interest. In certain embodiments, the heterologous signal sequence selected is one that is recognized and processed (i.e., cleaved by a signal peptidase) by the host cell. In mammalian cell expression, mammalian signal sequences as well as viral secretory leaders, for example, the herpes simplex gD signal, are available.

[0589] The DNA for such precursor region is ligated in reading frame to DNA encoding the antibody.

[0590] (ii) Origin of Replication

[0591] Generally, an origin of replication component is not needed for mammalian expression vectors. For example, the SV40 origin may typically be used only because it contains the early promoter.

[0592] (iii) Selection Gene Component

[0593] Expression and cloning vectors may contain a selection gene, also termed a selectable marker. Typical selection genes encode proteins that (a) confer resistance to antibiotics or other toxins, e.g., ampicillin, neomycin, methotrexate, or tetracycline, (b) complement auxotrophic deficiencies, where relevant, or (c) supply critical nutrients not available from complex media.

[0594] One example of a selection scheme utilizes a drug to arrest growth of a host cell. Those cells that are successfully transformed with a heterologous gene produce a protein conferring drug resistance and thus survive the selection regimen. Examples of such dominant selection use the drugs neomycin, mycophenolic acid and hygromycin.

[0595] Another example of suitable selectable markers for mammalian cells are those that enable the identification of cells competent to take up the antibody nucleic acid, such as DHFR, thymidine kinase, metallothionein-I and -II (e.g., primate metallothionein genes), adenosine deaminase, omithine decarboxylase, etc.

[0596] For example, cells transformed with the DHFR selection gene are first identified by culturing all of the transformants in a culture medium that contains methotrexate (Mtx), a competitive antagonist of DHFR. An appropriate host cell when wild-type DHFR is employed is the Chinese hamster ovary (CHO) cell line deficient in DHFR activity (e.g., ATCC CRL-9096).

[0597] Alternatively, host cells (particularly wild-type hosts that contain endogenous DHFR) transformed or co-transformed with DNA sequences encoding an antibody, wild-type DHFR protein, and another selectable marker such as aminoglycoside 3′-phosphotransferase (APH) can be selected by cell growth in medium containing a selection agent for the selectable marker such as an aminoglycosidic antibiotic, e.g., kanamycin, neomycin, or G418. See U.S. Pat. No. 4,965,199.

[0598] (iv) Promoter Component

[0599] Expression and cloning vectors usually contain a promoter that is recognized by the host organism and is operably linked to the antibody polypeptide nucleic acid. Promoter sequences are known for eukaryotes. Virtually all eukaryotic genes have an AT-rich region located approximately 25 to 30 bases upstream from the site where transcription is initiated. Another sequence found 70 to 80 bases upstream from the start of transcription of many genes is a CNCAAT region where N may be any nucleotide. At the 3′ end of most eukaryotic genes is an AATAAA sequence that may be the signal for addition of the poly A tail to the 3′ end of the coding sequence. All of these sequences are suitably inserted into eukaryotic expression vectors.

[0600] Antibody polypeptide transcription from vectors in mammalian host cells is controlled, for example, by promoters obtained from the genomes of viruses such as polyoma virus, fowlpox virus, adenovirus (such as Adenovirus 2), bovine papilloma virus, avian sarcoma virus, cytomegalovirus, a retrovirus, hepatitis-B virus and Simian Virus 40 (SV40), from heterologous mammalian promoters, e.g., the actin promoter or an immunoglobulin promoter, from heat-shock promoters, provided such promoters are compatible with the host cell systems.

[0601] The early and late promoters of the SV40 virus are conveniently obtained as an SV40 restriction fragment that also contains the SV40 viral origin of replication. The immediate early promoter of the human cytomegalovirus is conveniently obtained as a HindIII E restriction fragment. A system for expressing DNA in mammalian hosts using the bovine papilloma virus as a vector is disclosed in U.S. Pat. No. 4,419,446. A modification of this system is described in U.S. Pat. No. 4,601,978. See also Reyes et al., Nature 297:598-601 (1982) on expression of human β-interferon cDNA in mouse cells under the control of a thymidine kinase promoter from herpes simplex virus. Alternatively, the Rous Sarcoma Virus long terminal repeat can be used as the promoter.

[0602] (v) Enhancer Element Component

[0603] Transcription of DNA encoding the antibody polypeptide of this invention by higher eukaryotes is often increased by inserting an enhancer sequence into the vector. Many enhancer sequences are now known from mammalian genes (globin, elastase, albumin, α-fetoprotein, and insulin). Typically, however, one will use an enhancer from a eukaryotic cell virus. Examples include the SV40 enhancer on the late side of the replication origin (bp 100-270), the cytomegalovirus early promoter enhancer, the polyoma enhancer on the late side of the replication origin, and adenovirus enhancers. See also Yaniv, Nature 297:17-18 (1982) on enhancing elements for activation of eukaryotic promoters. The enhancer may be spliced into the vector at a position 5′ or 3′ to the antibody polypeptide-encoding sequence. In certain embodiments, the enhancer is located at a site 5′ from the promoter.

[0604] (vi) Transcription Termination Component

[0605] Expression vectors used in eukaryotic host cells will typically also contain sequences necessary for the termination of transcription and for stabilizing the mRNA. Such sequences are commonly available from the 5′ and, occasionally 3′, untranslated regions of eukaryotic or viral DNAs or cDNAs. These regions contain nucleotide segments transcribed as polyadenylated fragments in the untranslated portion of the mRNA encoding an antibody. One useful transcription termination component is the bovine growth hormone polyadenylation region. See WO94/11026 and the expression vector disclosed therein.

[0606] (vii) Selection and Transformation of Host Cells

[0607] Suitable host cells for cloning or expressing the DNA in the vectors herein include higher eukaryote cells described herein, including vertebrate host cells. Propagation of vertebrate cells in culture (tissue culture) has become a routine procedure. Examples of useful mammalian host cell lines are monkey kidney CV1 line transformed by SV40 (COS-7, ATCC CRL 1651); human embryonic kidney line (293 or 293 cells subcloned for growth in suspension culture, Graham et al., J. Gen Virol. 36:59 (1977)); baby hamster kidney cells (BHK, ATCC CCL 10); Chinese hamster ovary cells/-DHFR (CHO, Urlaub et al., Proc. Natl. Acad. Sci. USA 77:4216 (1980)); mouse sertoli cells (TM4, Mather, Biol. Reprod. 23:243-251 (1980)); monkey kidney cells (CV1 ATCC CCL 70); African green monkey kidney cells (VERO-76, ATCC CRL-1587); human cervical carcinoma cells (HELA, ATCC CCL 2); canine kidney cells (MDCK, ATCC CCL 34); buffalo rat liver cells (BRL 3A, ATCC CRL 1442); human lung cells (W138, ATCC CCL 75); human liver cells (Hep G2, HB 8065); mouse mammary tumor (MMT 060562, ATCC CCL51); TRI cells (Mather et al., Annals N.Y. Acad. Sci. 383:44-68 (1982)); MRC 5 cells; FS4 cells; and a human hepatoma line (Hep G2).

[0608] Host cells are transformed with the above-described expression or cloning vectors for antibody production and cultured in conventional nutrient media modified as appropriate for inducing promoters, selecting transformants, or amplifying the genes encoding the desired sequences.

[0609] (viii) Culturing the Host Cells

[0610] The host cells used to produce an antibody of this invention may be cultured in a variety of media. Commercially available media such as Ham's F10 (Sigma), Minimal Essential Medium ((MEM), (Sigma), RPMI-1640 (Sigma), and Dulbecco's Modified Eagle's Medium ((DMEM), Sigma) are suitable for culturing the host cells. In addition, any of the media described in Ham et al., Meth. Enz. 58:44 (1979), Barnes et al., Anal. Biochem.102:255 (1980), U.S. Pat. Nos. 4,767,704; 4,657,866; 4,927,762; 4,560,655; or 5,122,469; WO 90/03430; WO 87/00195; or U.S. Pat. Re. 30,985 may be used as culture media for the host cells. Any of these media may be supplemented as necessary with hormones and/or other growth factors (such as insulin, transferrin, or epidermal growth factor), salts (such as sodium chloride, calcium, magnesium, and phosphate), buffers (such as HEPES), nucleotides (such as adenosine and thymidine), antibiotics (such as GENTAMYCIN™ drug), trace elements (defined as inorganic compounds usually present at final concentrations in the micromolar range), and glucose or an equivalent energy source. Any other necessary supplements may also be included at appropriate concentrations that would be known to those skilled in the art. The culture conditions, such as temperature, pH, and the like, are those previously used with the host cell selected for expression, and will be apparent to the ordinarily skilled artisan.

[0611] (ix) Purification of Antibody

[0612] When using recombinant techniques, the antibody can be produced intracellularly, or directly secreted into the medium. If the antibody is produced intracellularly, as a first step, the particulate debris, either host cells or lysed fragments, are removed, for example, by centrifugation or ultrafiltration. Where the antibody is secreted into the medium, supernatants from such expression systems are generally first concentrated using a commercially available protein concentration filter, for example, an Amicon or Millipore Pellicon ultrafiltration unit. A protease inhibitor such as PMSF may be included in any of the foregoing steps to inhibit proteolysis and antibiotics may be included to prevent the growth of adventitious contaminants.

[0613] The antibody composition prepared from the cells can be purified using, for example, hydroxylapatite chromatography, gel electrophoresis, dialysis, and affinity chromatography. The suitability of protein A as an affinity ligand depends on the species and isotype of any immunoglobulin Fc domain that is present in the antibody. Protein A can be used to purify antibodies that are based on human γ1, γ2, or γ4 heavy chains (Lindmark et al., J. Immunol. Meth. 62:1-13 (1983)). Protein G is recommended for all mouse isotypes and for human γ3 (Guss et al., EMBO J. 5:15671575 (1986)). The matrix to which the affinity ligand is attached is most often agarose, but other matrices are available. Mechanically stable matrices such as controlled pore glass or poly(styrenedivinyl)benzene allow for faster flow rates and shorter processing times than can be achieved with agarose. Where the antibody comprises a C_{H}3 domain, the Bakerbond ABX™resin (J. T. Baker, Phillipsburg, N.J.) is useful for purification. Other techniques for protein purification such as fractionation on an ion-exchange column, ethanol precipitation, Reverse Phase HPLC, chromatography on silica, chromatography on heparin SEPHAROSE™ chromatography on an anion or cation exchange resin (such as a polyaspartic acid column), chromatofocusing, SDS-PAGE, and ammonium sulfate precipitation are also available depending on the antibody to be recovered.

[0614] Following any preliminary purification step(s), the mixture comprising the antibody of interest and contaminants may be subjected to low pH hydrophobic interaction chromatography using an elution buffer at a pH between about 2.5-4.5. In certain embodiments, the low pH hydrophobic interaction chromatography is performed at low salt concentrations (e.g., from about 0-0.25M salt).

Activity Assays

[0615] The antibodies of the present invention can be characterized for their physical/chemical properties and biological functions by various assays known in the art.

[0616] The purified immunoglobulins can be further characterized by a series of assays including, but not limited to, N-terminal sequencing, amino acid analysis, non-denaturing size exclusion high pressure liquid chromatography (HPLC), mass spectrometry, ion exchange chromatography and papain digestion.

[0617] In certain embodiments, the immunoglobulins produced herein are analyzed for their biological activity. In some embodiments, the immunoglobulins of the present invention are tested for their antigen binding activity. The antigen binding assays that are known in the art and can be used herein include without limitation any direct or competitive binding assays using techniques such as western blots, radioimmunoassays, ELISA (enzyme linked immunosorbent assay), “sandwich” immunoassays, immunoprecipitation assays, fluorescent immunoassays, and protein A immunoassays.

[0618] In one embodiment, the present invention contemplates an altered antibody that possesses some but not all effector functions, which make it a desired candidate for many applications in which the half life of the antibody in vivo is important yet certain effector functions (such as complement and ADCC) are unnecessary or deleterious. In certain embodiments, the Fc activities of the produced immunoglobulin are measured to ensure that only the desired properties are maintained. In vitro and/or in vivo cytotoxicity assays can be conducted to confirm the reduction/depletion of CDC and/or ADCC activities. For example, Fc receptor (FcR) binding assays can be conducted to ensure that the antibody lacks FcγR binding (hence likely lacking ADCC activity), but retains FcRn binding ability. The primary cells for mediating ADCC, NK cells, express FcγRIII only, whereas monocytes express FcγRI, FcγRII and FcγRIII. FcR expression on hematopoietic cells is summarized in Table 3 on page 464 of Ravetch and Kinet, Annu. Rev. Immunol 9:457-92 (1991). An example of an in vitro assay to assess ADCC activity of a molecule of interest is described in U.S. Pat. Nos. 5,500,362 or 5,821,337. Useful effector cells for such assays include peripheral blood mononuclear cells (PBMC) and Natural Killer (NK) cells. Alternatively, or additionally, ADCC activity of the molecule of interest may be assessed in vivo, e.g., in a animal model such as that disclosed in Clynes et al. PNAS (USA) 95:652-656 (1998). C1q binding assays may also be carried out to confirm that the antibody is unable to bind C1q and hence lacks CDC activity. To assess complement activation, a CDC assay, for example as described in Gazzano-Santoro et al., J. Immunol. Methods 202:163 (1996), may be performed. FcRn binding and in vivo clearance/half life determinations can also be performed using methods known in the art, e.g., those described in the Examples section.

Humanized Antibodies

[0619] The present invention encompasses humanized antibodies. Various methods for humanizing non-human antibodies are known in the art. For example, a humanized antibody can have one or more amino acid residues introduced into it from a source which is non-human. These non-human amino acid residues are often referred to as “import” residues, which are typically taken from an “import” variable domain. Humanization can be essentially performed following the method of Winter and co-workers (Jones et al. (1986) Nature 321:522-525; Riechmann et al. (1988) Nature 332:323-327; Verhoeyen et al. (1988) Science 239:1534-1536), by substituting hypervariable region sequences for the corresponding sequences of a human antibody. Accordingly, such “humanized” antibodies are chimeric antibodies (U.S. Pat. No. 4,816,567) wherein substantially less than an intact human variable domain has been substituted by the corresponding sequence from a non-human species. In practice, humanized antibodies are typically human antibodies in which some hypervariable region residues and possibly some FR residues are substituted by residues from analogous sites in rodent antibodies.

[0620] The choice of human variable domains, both light and heavy, to be used in making the humanized antibodies is very important to reduce antigenicity. According to the so-called “best-fit” method, the sequence of the variable domain of a rodent antibody is screened against the entire library of known human variable-domain sequences. The human sequence which is closest to that of the rodent is then accepted as the human framework for the humanized antibody (Sims et al. (1993) J. Immunol. 151:2296; Chothia et al. (1987) J. Mol. Biol. 196:901). Another method uses a particular framework derived from the consensus sequence of all human antibodies of a particular subgroup of light or heavy chains. The same framework may be used for several different humanized antibodies (Carter et al. (1992) Proc. Natl. Acad. Sci. USA, 89:4285; Presta et al. (1 993) J. Immunol., 151:2623).

[0621] It is further important that antibodies be humanized with retention of high affinity for the antigen and other favorable biological properties. To achieve this goal, according to one method, humanized antibodies are prepared by a process of analysis of the parental sequences and various conceptual humanized products using three-dimensional models of the parental and humanized sequences. Three-dimensional immunoglobulin models are commonly available and are familiar to those skilled in the art. Computer programs are available which illustrate and display probable three-dimensional conformational structures of selected candidate immunoglobulin sequences. Inspection of these displays permits analysis of the likely role of the residues in the functioning of the candidate immunoglobulin sequence, i.e., the analysis of residues that influence the ability of the candidate immunoglobulin to bind its antigen. In this way, FR residues can be selected and combined from the recipient and import sequences so that the desired antibody characteristic, such as increased affinity for the target antigen(s), is achieved. In general, the hypervariable region residues are directly and most substantially involved in influencing antigen binding.

Antibody Variants

[0622] In one aspect, the invention provides antibody fragments comprising modifications in the interface of Fc polypeptides comprising the Fc region, wherein the modifications facilitate and/or promote heterodimerization. These modifications comprise introduction of a protuberance into a first Fc polypeptide and a cavity into a second Fc polypeptide, wherein the protuberance is positionable in the cavity so as to promote complexing of the first and second Fc polypeptides. Methods of generating antibodies with these modifications are known in the art, e.g., as described in U.S. Pat. No. 5,731,168.

[0623] In some embodiments, amino acid sequence modification(s) of the antibodies described herein are contemplated. For example, it may be desirable to improve the binding affinity and/or other biological properties of the antibody. Amino acid sequence variants of the antibody are prepared by introducing appropriate nucleotide changes into the antibody nucleic acid, or by peptide synthesis. Such modifications include, for example, deletions from, and/or insertions into and/or substitutions of, residues within the amino acid sequences of the antibody. Any combination of deletion, insertion, and substitution is made to arrive at the final construct, provided that the final construct possesses the desired characteristics. The amino acid alterations may be introduced in the subject antibody amino acid sequence at the time that sequence is made.

[0624] A useful method for identification of certain residues or regions of the antibody that are preferred locations for mutagenesis is called “alanine scanning mutagenesis” as described by Cunningham and Wells (1989) Science, 244:1081-1085. Here, a residue or group of target residues are identified (e.g., charged residues such as arg, asp, his, lys, and glu) and replaced by a neutral or negatively charged amino acid (e.g., alanine or polyalanine) to affect the interaction of the amino acids with antigen. Those amino acid locations demonstrating functional sensitivity to the substitutions then are refined by introducing further or other variants at, or for, the sites of substitution. Thus, while the site for introducing an amino acid sequence variation is predetermined, the nature of the mutation per se need not be predetermined. For example, to analyze the performance of a mutation at a given site, ala scanning or random mutagenesis is conducted at the target codon or region and the expressed immunoglobulins are screened for the desired activity.

[0625] Amino acid sequence insertions include amino- and/or carboxyl-terminal fusions ranging in length from one residue to polypeptides containing a hundred or more residues, as well as intrasequence insertions of single or multiple amino acid residues. Examples of terminal insertions include an antibody with an N-terminal methionyl residue or the antibody fused to a cytotoxic polypeptide. Other insertional variants of the antibody molecule include the fusion to the N- or C-terminus of the antibody to an enzyme (e.g. for ADEPT) or a polypeptide which increases the serum half-life of the antibody.

[0626] Another type of variant is an amino acid substitution variant. These variants have at least one amino acid residue in the antibody molecule replaced by a different residue. The sites of greatest interest for substitutional mutagenesis include the hypervariable regions, but FR alterations are also contemplated. Conservative substitutions are shown in Table 2 under the heading of “preferred substitutions”. If such substitutions result in a change in biological activity, then more substantial changes, denominated “exemplary substitutions” in the table below, or as further described below in reference to amino acid classes, may be introduced and the products screened.

| Original | Exemplary | Preferred |
|---|---|---|
| Residue | Substitutions | Substitutions |
| Ala (A) | Val; Leu; Ile | Val |
| Arg (R) | Lys; Gln; Asn | Lys |
| Asn (N) | Gln; His; Asp, Lys; Arg | Gln |
| Asp (D) | Glu; Asn | Glu |
| Cys (C) | Ser; Ala | Ser |
| Gln (Q) | Asn; Glu | Asn |
| Glu (E) | Asp; Gln | Asp |
| Gly (G) | Ala | Ala |
| His (H) | Asn; Gln; Lys; Arg | Arg |
| Ile (I) | Leu; Val; Met; Ala; Phe; | Leu |
| | Norleucine | |
| Leu (L) | Norleucine; Ile; Val; Met; | Ile |
| | Ala; Phe | |
| Lys (K) | Arg; Gln; Asn | Arg |
| Met (M) | Leu; Phe; Ile | Leu |
| Phe (F) | Trp; Leu; Val; Ile; Ala; Tyr | Tyr |
| Pro (P) | Ala | Ala |
| Ser (S) | Thr | Thr |
| Thr (T) | Val; Ser | Ser |
| Trp (W) | Tyr; Phe | Tyr |
| Tyr (Y) | Trp; Phe; Thr; Ser | Phe |
| Val (V) | Ile; Leu; Met; Phe; Ala; | Leu |
| | Norleucine | |

[0627] Substantial modifications in the biological properties of the antibody are accomplished by selecting substitutions that differ significantly in their effect on maintaining (a) the structure of the polypeptide backbone in the area of the substitution, for example, as a sheet or helical conformation, (b) the charge or hydrophobicity of the molecule at the target site, or (c) the bulk of the side chain. Amino acids may be grouped according to similarities in the properties of their side chains (in A. L. Lehninger, in Biochemistry, second ed., pp. 73-75, Worth Publishers, New York (1975)):
[0628] (1) non-polar: Ala (A), Val (V), Leu (L), Ile (I), Pro (P), Phe (F), Trp (W), Met (M)
[0629] (2) uncharged polar: Gly (G), Ser (S), Thr (T), Cys (C), Tyr (Y), Asn (N), Gln (Q)
[0630] (3) acidic: Asp (D), Glu (E)
[0631] (4) basic: Lys (K), Arg (R), His(H)

[0632] Alternatively, naturally occurring residues may be divided into groups based on common side-chain properties:

[0633] (1) hydrophobic: Norleucine, Met, Ala, Val, Leu, Ile;

[0634] (2) neutral hydrophilic: Cys, Ser, Thr. Asn, Gln;

[0635] (3) acidic: Asp, Glu;

[0636] (4) basic: His, Lys, Arg;

[0637] (5) residues that influence chain orientation: Gly, Pro;

[0638] (6) aromatic: Trp, Tyr, Phe.

[0639] Non-conservative substitutions will entail exchanging a member of one of these classes for another class. Such substituted residues also may be introduced into the conservative substitution sites or, into the remaining (non-conserved) sites.

[0640] One type of substitutional variant involves substituting one or more hypervariable region residues of a parent antibody (e.g. a humanized or human antibody). Generally, the resulting variant(s) selected for further development will have improved biological properties relative to the parent antibody from which they are generated. A convenient way for generating such substitutional variants involves affinity maturation using phage display. Briefly, several hypervariable region sites (e.g. 6-7 sites) are mutated to generate all possible amino acid substitutions at each site. The antibodies thus generated are displayed from filamentous phage particles as fusions to the gene III product of M13 packaged within each particle. The phage-displayed variants are then screened for their biological activity (e.g. binding affinity) as herein disclosed. In order to identify candidate hypervariable region sites for modification, alanine scanning mutagenesis can be performed to identify hypervariable region residues contributing significantly to antigen binding. Alternatively, or additionally, it may be beneficial to analyze a crystal structure of the antigen-antibody complex to identify contact points between the antibody and antigen. Such contact residues and neighboring residues are candidates for substitution according to the techniques elaborated herein. Once such variants are generated, the panel of variants is subjected to screening as described herein and antibodies with superior properties in one or more relevant assays may be selected for further development.

[0641] Nucleic acid molecules encoding amino acid sequence variants of the antibody are prepared by a variety of methods known in the art. These methods include, but are not limited to, isolation from a natural source (in the case of naturally occurring amino acid sequence variants) or preparation by oligonucleotide-mediated (or site-directed) mutagenesis, PCR mutagenesis, and cassette mutagenesis of an earlier prepared variant or a non-variant version of the antibody.

[0642] It may be desirable to introduce one or more amino acid modifications in an Fc region of the immunoglobulin polypeptides of the invention, thereby generating an Fc region variant. The Fc region variant may comprise a human Fc region sequence (e.g., a human IgG1, IgG2, IgG3 or IgG4 Fc region) comprising an amino acid modification (e.g. a substitution) at one or more amino acid positions including that of a hinge cysteine.

[0643] In accordance with this description and the teachings of the art, it is contemplated that in some embodiments, an antibody used in methods of the invention may comprise one or more alterations as compared to the wild type counterpart antibody, for example in the Fc region. These antibodies would nonetheless retain substantially the same characteristics required for therapeutic utility as compared to their wild type counterpart. For example, it is thought that certain alterations can be made in the Fc region that would result in altered (i.e., either improved or diminished) C1q binding and/or Complement Dependent Cytotoxicity (CDC), for example, as described in WO99/51642. See also Duncan & Winter Nature 322:738-40 (1988); U.S. Pat. No. 5,648,260; U.S. Pat. No. 5,624,821; and WO94/29351 concerning other examples of Fc region variants.

Immunoconjugates

[0644] The invention also pertains to immunoconjugates, or antibody-drug conjugates (ADC), comprising an antibody conjugated to a cytotoxic agent such as a chemotherapeutic agent, a drug, a growth inhibitory agent, a toxin (e.g., an enzymatically active toxin of bacterial, fungal, plant, or animal origin, or fragments thereof), or a radioactive isotope (i.e., a radioconjugate).

[0645] The use of antibody-drug conjugates for the local delivery of cytotoxic or cytostatic agents, i.e. drugs to kill or inhibit tumor cells in the treatment of cancer (Syrigos and Epenetos (1999) Anticancer Research 19:605-614; Niculescu-Duvaz and Springer (1997) Adv. Drg Del. Rev. 26:151-172; U.S. Pat. No. 4,975,278) theoretically allows targeted delivery of the drug moiety to tumors, and intracellular accumulation therein, where systemic administration of these unconjugated drug agents may result in unacceptable levels of toxicity to normal cells as well as the tumor cells sought to be eliminated (Baldwin et al., (1986) Lancet pp. (Mar. 15, 1986):603-05; Thorpe, (1985) “Antibody Carriers Of Cytotoxic Agents In Cancer Therapy: A Review,” in Monoclonal Antibodies '84: Biological And Clinical Applications, A. Pinchera et al. (eds.), pp. 475-506). Maximal efficacy with minimal toxicity is sought thereby. Both polyclonal antibodies and monoclonal antibodies have been reported as useful in these strategies (Rowland et al., (1986) Cancer Immunol. Immunother., 21:183-87). Drugs used in these methods include daunomycin, doxorubicin, methotrexate, and vindesine (Rowland et al., (1986) supra). Toxins used in antibody-toxin conjugates include bacterial toxins such as diphtheria toxin, plant toxins such as ricin, small molecule toxins such as geldanamycin (Mandler et al (2000) Jour. of the Nat. Cancer Inst. 92(19):1573-1581; Mandler et al (2000) Bioorganic & Med. Chem. Letters 10:1025-1028; Mandler et al (2002) Bioconjugate Chem. 13:786-791), maytansinoids (EP 1391213; Liu et al., (1996) Proc. Natl. Acad. Sci. USA 93:8618-8623), and calicheamicin (Lode et al (1998) Cancer Res. 58:2928; Hinman et al (1993) Cancer Res. 53:3336-3342). The toxins may effect their cytotoxic and cytostatic effects by mechanisms including tubulin binding, DNA binding, or topoisomerase inhibition. Some cytotoxic drugs tend to be inactive or less active when conjugated to large antibodies or protein receptor ligands.

[0646] ZEVALIN® (ibritumomab tiuxetan, Biogen/Idec) is an antibody-radioisotope conjugate composed of a murine IgG1 kappa monoclonal antibody directed against the CD20 antigen found on the surface of normal and malignant B lymphocytes and ¹¹¹In or ⁹⁰Y radioisotope bound by a thiourea linker-chelator (Wiseman et al (2000) Eur. Jour. Nucl. Med. 27(7):766-77; Wiseman et al (2002) Blood 99(12):4336-42; Witzig et al (2002) J. Clin. Oncol. 20(10):2453-63; Witzig et al (2002) J. Clin. Oncol. 20(15):3262-69). Although ZEVALIN has activity against B-cell non-Hodgkin's Lymphoma (NHL), administration results in severe and prolonged cytopenias in most patients. MYLOTARG™ (gemtuzumab ozogamicin, Wyeth Pharmaceuticals), an antibody drug conjugate composed of a hu CD33 antibody linked to calicheamicin, was approved in 2000 for the treatment of acute myeloid leukemia by injection (Drugs of the Future (2000) 25(7):686; U.S. Pat. Nos. 4,970,198; 5,079,233; 5,585,089; 5,606,040; 5,693,762; 5,739,116; 5,767,285; 5,773,001). Cantuzumab mertansine (Immunogen, Inc.), an antibody drug conjugate composed of the huC242 antibody linked via the disulfide linker SPP to the maytansinoid drug moiety, DM1, is advancing into Phase II trials for the treatment of cancers that express CanAg, such as colon, pancreatic, gastric, and others. MLN-2704 (Millennium Pharm., BZL Biologics, Immunogen Inc.), an antibody drug conjugate composed of the anti-prostate specific membrane antigen (PSMA) monoclonal antibody linked to the maytansinoid drug moiety, DM1, is under development for the potential treatment of prostate tumors. The auristatin peptides, auristatin E (AE) and monomethylauristatin (MMAE), synthetic analogs of dolastatin, were conjugated to chimeric monoclonal antibodies cBR96 (specific to Lewis Y on carcinomas) and cAC10 (specific to CD30 on hematological malignancies) (Doronina et al (2003) Nature Biotechnology 21(7):778-784) and are under therapeutic development.

[0647] Chemotherapeutic agents useful in the generation of such immunoconjugates have been described above. Enzymatically active toxins and fragments thereof that can be used include without limitation diphtheria A chain, nonbinding active fragments of diphtheria toxin, exotoxin A chain (from Pseudomonas aeruginosa), ricin A chain, abrin A chain, modeccin A chain, alpha-sarcin, Aleurites fordii proteins, dianthin proteins, Phytolaca americana proteins (PAPI, PAPII, and PAP-S), momordica charantia inhibitor, curcin, crotin, sapaonaria officinalis inhibitor, gelonin, mitogellin, restrictocin, phenomycin, enomycin, and the tricothecenes. A variety of radionuclides are available for the production of radioconjugated antibodies. Examples include ²¹²Bi, ¹³¹I, ¹³¹In, ⁹⁰Y, and ¹⁸⁶Re. Conjugates of the antibody and cytotoxic agent are made using a variety of bifunctional protein-coupling agents such as N-succinimidyl-3-(2-pyridyldithiol)propionate (SPDP), iminothiolane (IT), bifunctional derivatives of imidoesters (such as dimethyl adipimidate HCl), active esters (such as disuccinimidyl suberate), aldehydes (such as glutaraldehyde), bis-azido compounds (such as bis (p-azidobenzoyl)hexanediamine), bis-diazonium derivatives (such as bis-(p-diazoniumbenzoyl)-ethylenediamine), diisocyanates (such as toluene 2,6-diisocyanate), and bis-active fluorine compounds (such as 1,5-difluoro-2,4-dinitrobenzene). For example, a ricin immunotoxin can be prepared as described in Vitetta et al., Science, 238: 1098 (1987). Carbon-14-labeled 1-isothiocyanatobenzyl-3-methyldiethylene triaminepentaacetic acid (MX-DTPA) is an exemplary chelating agent for conjugation of radionucleotide to the antibody. See WO94/11026.

[0648] Conjugates of an antibody and one or more small molecule toxins, such as a calicheamicin, maytansinoids, a trichothecene, and CC1065, and the derivatives of these toxins that have toxin activity, are also contemplated herein.

Maytansine and Maytansinoids

[0649] In one embodiment, an antibody (full length or fragments) of the invention is conjugated to one or more maytansinoid molecules.

[0650] Maytansinoids are mitotic inhibitors which act by inhibiting tubulin polymerization. Maytansine was first isolated from the east African shrub Maytenus serrata (U.S. Pat. No. 3,896,111). Subsequently, it was discovered that certain microbes also produce maytansinoids, such as maytansinol and C-3 maytansinol esters (U.S. Pat. No. 4,151,042). Synthetic maytansinol and derivatives and analogues thereof are disclosed, for example, in U.S. Pat. Nos. 4,137,230; 4,248,870; 4,256,746; 4,260,608; 4,265,814; 4,294,757; 4,307,016; 4,308,268; 4,308,269; 4,309,428; 4,313,946; 4,315,929; 4,317,821; 4,322,348; 4,331,598; 4,361,650; 4,364,866; 4,424,219; 4,450,254; 4,362,663; and 4,371,533, the disclosures of which are hereby expressly incorporated by reference.

Maytansinoid-Antibody Conjugates

[0651] In an attempt to improve their therapeutic index, maytansine and maytansinoids have been conjugated to antibodies specifically binding to tumor cell antigens. Immunoconjugates containing maytansinoids and their therapeutic use are disclosed, for example, in U.S. Pat. Nos. 5,208,020, 5,416,064 and European Patent EP 0 425 235 B1, the disclosures of which are hereby expressly incorporated by reference. Liu et al., Proc. Natl. Acad. Sci. USA 93:8618-8623 (1996) described immunoconjugates comprising a maytansinoid designated DM1 linked to the monoclonal antibody C242 directed against human colorectal cancer. The conjugate was found to be highly cytotoxic towards cultured colon cancer cells, and showed antitumor activity in an in vivo tumor growth assay. Chari et al., Cancer Research 52:127-131 (1992) describe immunoconjugates in which a maytansinoid was conjugated via a disulfide linker to the murine antibody A7 binding to an antigen on human colon cancer cell lines, or to another murine monoclonal antibody TA.1 that binds the HER-2/neu oncogene. The cytotoxicity of the TA.1-maytansonoid conjugate was tested in vitro on the human breast cancer cell line SK-BR-3, which expresses 3×10⁵ HER-2 surface antigens per cell. The drug conjugate achieved a degree of cytotoxicity similar to the free maytansinoid drug, which could be increased by increasing the number of maytansinoid molecules per antibody molecule. The A7-maytansinoid conjugate showed low systemic cytotoxicity in mice.

Antibody-Maytansinoid Conjugates (Immunoconjugates)

[0652] Antibody-maytansinoid conjugates are prepared by chemically linking an antibody to a maytansinoid molecule without significantly diminishing the biological activity of either the antibody or the maytansinoid molecule. An average of 3-4 maytansinoid molecules conjugated per antibody molecule has shown efficacy in enhancing cytotoxicity of target cells without negatively affecting the function or solubility of the antibody, although even one molecule of toxin/antibody would be expected to enhance cytotoxicity over the use of naked antibody. Maytansinoids are well known in the art and can be synthesized by known techniques or isolated from natural sources. Suitable maytansinoids are disclosed, for example, in U.S. Pat. No. 5,208,020 and in the other patents and nonpatent publications referred to hereinabove. In certain embodiments, maytansinoids are maytansinol and maytansinol analogues modified in the aromatic ring or at other positions of the maytansinol molecule, such as various maytansinol esters.

[0653] There are many linking groups known in the art for making antibody-maytansinoid conjugates, including, for example, those disclosed in U.S. Pat. No. 5,208,020 or EP Patent 0 425 235 B1, and Chari et al., Cancer Research 52:127-131 (1992). The linking groups include disulfide groups, thioether groups, acid labile groups, photolabile groups, peptidase labile groups, or esterase labile groups, as disclosed in the above-identified patents.

[0654] Conjugates of the antibody and maytansinoid may be made using a variety of bifunctional protein coupling agents such as N-succinimidyl-3-(2-pyridyldithio)propionate (SPDP), succinimidyl-4-(N-maleimidomethyl)cyclohexane-1-carboxylate, iminothiolane (IT), bifunctional derivatives of imidoesters (such as dimethyl adipimidate HCl), active esters (such as disuccinimidyl suberate), aldehydes (such as glutaraldehyde), bis-azido compounds (such as bis (p-azidobenzoyl)hexanediamine), bis-diazonium derivatives (such as bis-(p-diazoniumbenzoyl)-ethylenediamine), diisocyanates (such as toluene 2,6-diisocyanate), and bis-active fluorine compounds (such as 1,5-difluoro-2,4-dinitrobenzene). In certain embodiments, coupling agents include N-succinimidyl-3-(2-pyridyldithio)propionate (SPDP) (Carlsson et al., Biochem. J. 173:723-737 [1978]) and N-succinimidyl-4-(2-pyridylthio)pentanoate (SPP) to provide for a disulfide linkage.

[0655] The linker may be attached to the maytansinoid molecule at various positions, depending on the type of the link. For example, an ester linkage may be formed by reaction with a hydroxyl group using conventional coupling techniques. The reaction may occur at the C-3 position having a hydroxyl group, the C-14 position modified with hydroxymethyl, the C-15 position modified with a hydroxyl group, and the C-20 position having a hydroxyl group. In one embodiment, the linkage is formed at the C-3 position of maytansinol or a maytansinol analogue.

Calicheamicin

[0656] Another immunoconjugate of interest comprises an antibody conjugated to one or more calicheamicin molecules. The calicheamicin family of antibiotics are capable of producing double-stranded DNA breaks at sub-picomolar concentrations. For the preparation of conjugates of the calicheamicin family, see U.S. Pat. Nos. 5,712,374, 5,714,586, 5,739,116, 5,767,285, 5,770,701, 5,770,710, 5,773,001, 5,877,296 (all to American Cyanamid Company). Structural analogues of calicheamicin which may be used include, but are not limited to, γ₁^{I}, α₂^{I}, α₃^{I}, N-acetyl-γ₁^{I}, PSAG and θ^{I}₁ (Hinman et al., Cancer Research 53:3336-3342 (1993), Lode et al., Cancer Research 58:2925-2928 (1998) and the aforementioned U.S. patents to American Cyanamid). Another anti-tumor drug that the antibody can be conjugated is QFA which is an antifolate. Both calicheamicin and QFA have intracellular sites of action and do not readily cross the plasma membrane. Therefore, cellular uptake of these agents through antibody mediated internalization greatly enhances their cytotoxic effects.

Other Cytotoxic Agents

[0657] Other antitumor agents that can be conjugated to the antibodies of the invention include BCNU, streptozoicin, vincristine and 5-fluorouracil, the family of agents known collectively LL-E33288 complex described in U.S. Pat. Nos. 5,053,394, 5,770,710, as well as esperamicins (U.S. Pat. No. 5,877,296).

[0658] Enzymatically active toxins and fragments thereof which can be used include diphtheria A chain, nonbinding active fragments of diphtheria toxin, exotoxin A chain (from Pseudomonas aeruginosa), ricin A chain, abrin A chain, modeccin A chain, alpha-sarcin, Aleurites fordii proteins, dianthin proteins, Phytolaca americana proteins (PAPI, PAPII, and PAP-S), momordica charantia inhibitor, curcin, crotin, sapaonaria officinalis inhibitor, gelonin, mitogellin, restrictocin, phenomycin, enomycin and the tricothecenes. See, for example, WO 93/21232 published Oct. 28, 1993.

[0659] The present invention further contemplates an immunoconjugate formed between an antibody and a compound with nucleolytic activity (e.g., a ribonuclease or a DNA endonuclease such as a deoxyribonuclease; DNase).

[0660] For selective destruction of the tumor, the antibody may comprise a highly radioactive atom. A variety of radioactive isotopes are available for the production of radioconjugated antibodies. Examples include At²¹¹, I¹³¹, I¹²⁵, Y⁹⁰, Re¹⁸⁶, Re¹⁸⁸, Sm¹⁵³, Bi²¹², P³², Pb²¹² and radioactive isotopes of Lu. When the conjugate is used for detection, it may comprise a radioactive atom for scintigraphic studies, for example tc^{99m} or I¹²³, or a spin label for nuclear magnetic resonance (NMR) imaging (also known as magnetic resonance imaging, MRI), such as iodine-123 again, iodine-131, indium-111, fluorine-19, carbon-13, nitrogen-15, oxygen-17, gadolinium, manganese or iron.

[0661] The radio- or other labels may be incorporated in the conjugate in known ways. For example, the peptide may be biosynthesized or may be synthesized by chemical amino acid synthesis using suitable amino acid precursors involving, for example, fluorine-19 in place of hydrogen. Labels such as tc^{99m} or I¹²³, .Re¹⁸⁶, Re¹⁸⁸ and In¹¹¹ can be attached via a cysteine residue in the peptide. Yttrium-90 can be attached via a lysine residue. The IODOGEN method (Fraker et al (1978) Biochem. Biophys. Res. Commun. 80: 49-57) can be used to incorporate iodine-123. “Monoclonal Antibodies in Immunoscintigraphy” (Chatal, CRC Press 1989) describes other methods in detail.

[0662] Conjugates of the antibody and cytotoxic agent may be made using a variety of bifunctional protein coupling agents such as N-succinimidyl-3-(2-pyridyldithio)propionate (SPDP), succinimidyl-4-(N-maleimidomethyl)cyclohexane-1-carboxylate, iminothiolane (IT), bifunctional derivatives of imidoesters (such as dimethyl adipimidate HCl), active esters (such as disuccinimidyl suberate), aldehydes (such as glutaraldehyde), bis-azido compounds (such as bis (p-azidobenzoyl)hexanediamine), bis-diazonium derivatives (such as bis-(p-diazoniumbenzoyl)-ethylenediamine), diisocyanates (such as toluene 2,6-diisocyanate), and bis-active fluorine compounds (such as 1,5-difluoro-2,4-dinitrobenzene). For example, a ricin immunotoxin can be prepared as described in Vitetta et al., Science 238:1098 (1987). Carbon-14-labeled 1-isothiocyanatobenzyl-3-methyldiethylene triaminepentaacetic acid (MX-DTPA) is an exemplary chelating agent for conjugation of radionucleotide to the antibody. See WO94/11026. The linker may be a “cleavable linker” facilitating release of the cytotoxic drug in the cell. For example, an acid-labile linker, peptidase-sensitive linker, photolabile linker, dimethyl linker or disulfide-containing linker (Chari et al., Cancer Research 52:127-131 (1992); U.S. Pat. No. 5,208,020) may be used.

[0663] The compounds of the invention expressly contemplate, but are not limited to, ADC prepared with cross-linker reagents: BMPS, EMCS, GMBS, HBVS, LC-SMCC, MBS, MPBH, SBAP, SIA, SIAB, SMCC, SMPB, SMPH, sulfo-EMCS, sulfo-GMBS, sulfo-KMUS, sulfo-MBS, sulfo-SIAB, sulfo-SMCC, and sulfo-SMPB, and SVSB (succinimidyl-(4-vinylsulfone)benzoate) which are commercially available (e.g., from Pierce Biotechnology, Inc., Rockford, Ill., U.S.A). See pages 467-498, 2003-2004 Applications Handbook and Catalog.

Preparation of Antibody Drug Conjugates

[0664] In the antibody drug conjugates (ADC) of the invention, an antibody (Ab) is conjugated to one or more drug moieties (D), e.g. about 1 to about 20 drug moieties per antibody, through a linker (L). The ADC of Formula I may be prepared by several routes, employing organic chemistry reactions, conditions, and reagents known to those skilled in the art, including: (1) reaction of a nucleophilic group of an antibody with a bivalent linker reagent, to form Ab-L, via a covalent bond, followed by reaction with a drug moiety D; and (2) reaction of a nucleophilic group of a drug moiety with a bivalent linker reagent, to form D-L, via a covalent bond, followed by reaction with the nucleophilic group of an antibody.
Ab−(L−D)ₚ I

[0665] Nucleophilic groups on antibodies include, but are not limited to: (i) N-terminal amine groups, (ii) side chain amine groups, e.g. lysine, (iii) side chain thiol groups, e.g. cysteine, and (iv) sugar hydroxyl or amino groups where the antibody is glycosylated. Amine, thiol, and hydroxyl groups are nucleophilic and capable of reacting to form covalent bonds with electrophilic groups on linker moieties and linker reagents including: (i) active esters such as NHS esters, HOBt esters, haloformates, and acid halides; (ii) alkyl and benzyl halides such as haloacetamides; (iii) aldehydes, ketones, carboxyl, and maleimide groups. Certain antibodies have reducible interchain disulfides, i.e. cysteine bridges. Antibodies may be made reactive for conjugation with linker reagents by treatment with a reducing agent such as DTT (dithiothreitol). Each cysteine bridge will thus form, theoretically, two reactive thiol nucleophiles. Additional nucleophilic groups can be introduced into antibodies through the reaction of lysines with 2-iminothiolane (Traut's reagent) resulting in conversion of an amine into a thiol.

[0666] Antibody drug conjugates of the invention may also be produced by modification of the antibody to introduce electrophilic moieties, which can react with nucleophilic substituents on the linker reagent or drug. The sugars of glycosylated antibodies may be oxidized, e.g. with periodate oxidizing reagents, to form aldehyde or ketone groups which may react with the amine group of linker reagents or drug moieties. The resulting imine Schiff base groups may form a stable linkage, or may be reduced, e.g. by borohydride reagents to form stable amine linkages. In one embodiment, reaction of the carbohydrate portion of a glycosylated antibody with either galactose oxidase or sodium meta-periodate may yield carbonyl (aldehyde and ketone) groups in the protein that can react with appropriate groups on the drug (Hermanson, Bioconjugate Techniques). In another embodiment, proteins containing N-terminal serine or threonine residues can react with sodium meta-periodate, resulting in production of an aldehyde in place of the first amino acid (Geoghegan & Stroh, (1992) Bioconjugate Chem. 3:138-146; U.S. Pat. No. 5,362,852). Such aldehyde can be reacted with a drug moiety or linker nucleophile.

[0667] Likewise, nucleophilic groups on a drug moiety include, but are not limited to: amine, thiol, hydroxyl, hydrazide, oxime, hydrazine, thiosemicarbazone, hydrazine carboxylate, and arylhydrazide groups capable of reacting to form covalent bonds with electrophilic groups on linker moieties and linker reagents including: (i) active esters such as NHS esters, HOBt esters, haloformates, and acid halides; (ii) alkyl and benzyl halides such as haloacetamides; (iii) aldehydes, ketones, carboxyl, and maleimide groups.

[0668] Alternatively, a fusion protein comprising the antibody and cytotoxic agent may be made, e.g., by recombinant techniques or peptide synthesis. The length of DNA may comprise respective regions encoding the two portions of the conjugate either adjacent one another or separated by a region encoding a linker peptide which does not destroy the desired properties of the conjugate.

[0669] In yet another embodiment, the antibody may be conjugated to a “receptor” (such streptavidin) for utilization in tumor pre-targeting wherein the antibody-receptor conjugate is administered to the patient, followed by removal of unbound conjugate from the circulation using a clearing agent and then administration of a “ligand” (e.g., avidin) which is conjugated to a cytotoxic agent (e.g., a radionucleotide).

Antibody Derivatives

[0670] The antibodies of the present invention can be further modified to contain additional nonproteinaceous moieties that are known in the art and readily available. In certain embodiments, the moieties suitable for derivatization of the antibody are water soluble polymers. Non-limiting examples of water soluble polymers include, but are not limited to, polyethylene glycol (PEG), copolymers of ethylene glycol/propylene glycol, carboxymethylcellulose, dextran, polyvinyl alcohol, polyvinyl pyrrolidone, poly-1,3-dioxolane, poly-1,3,6-trioxane, ethylene/maleic anhydride copolymer, polyaminoacids (either homopolymers or random copolymers), and dextran or poly(n-vinyl pyrrolidone)polyethylene glycol, propropylene glycol homopolymers, prolypropylene oxide/ethylene oxide co-polymers, polyoxyethylated polyols (e.g., glycerol), polyvinyl alcohol, and mixtures thereof. Polyethylene glycol propionaldehyde may have advantages in manufacturing due to its stability in water. The polymer may be of any molecular weight, and may be branched or unbranched. The number of polymers attached to the antibody may vary, and if more than one polymers are attached, they can be the same or different molecules. In general, the number and/or type of polymers used for derivatization can be determined based on considerations including, but not limited to, the particular properties or functions of the antibody to be improved, whether the antibody derivative will be used in a therapy under defined conditions, etc.

Pharmaceutical Formulations

[0671] Therapeutic formulations comprising an antibody of the invention are prepared for storage by mixing the antibody having the desired degree of purity with optional physiologically acceptable carriers, excipients or stabilizers (Remington's Pharmaceutical Sciences 16th edition, Osol, A. Ed. (1980)), in the form of aqueous solutions, lyophilized or other dried formulations. Acceptable carriers, excipients, or stabilizers are nontoxic to recipients at the dosages and concentrations employed, and include buffers such as phosphate, citrate, histidine and other organic acids; antioxidants including ascorbic acid and methionine; preservatives (such as octadecyldimethylbenzyl ammonium chloride; hexamethonium chloride; benzalkonium chloride, benzethonium chloride; phenol, butyl or benzyl alcohol; alkyl parabens such as methyl or propyl paraben; catechol; resorcinol; cyclohexanol; 3-pentanol; and m-cresol); low molecular weight (less than about 10 residues) polypeptides; proteins, such as serum albumin, gelatin, or immunoglobulins; hydrophilic polymers such as polyvinylpyrrolidone; amino acids such as glycine, glutamine, asparagine, histidine, arginine, or lysine; monosaccharides, disaccharides, and other carbohydrates including glucose, niannose, or dextrins; chelating agents such as EDTA; sugars such as sucrose, mannitol, trehalose or sorbitol; salt-forming counter-ions such as sodium; metal complexes (e.g., Zn-protein complexes); and/or non-ionic surfactants such as TWEEN™, PLURONICS™ or polyethylene glycol (PEG).

[0672] The formulation herein may also contain more than one active compound as necessary for the particular indication being treated. In certain such embodiments, the compounds have complementary activities that do not adversely affect each other. Such molecules are suitably present in combination in amounts that are effective for the purpose intended.

[0673] The active ingredients may also be entrapped in microcapsule prepared, for example, by coacervation techniques or by interfacial polymerization, for example, hydroxymethylcellulose or gelatin-microcapsule and poly-(methylmethacylate) microcapsule, respectively, in colloidal drug delivery systems (for example, liposomes, albumin microspheres, microemulsions, nano-particles and nanocapsules) or in macroemulsions. Such techniques are disclosed in Remington's Pharmaceutical Sciences 16th edition, Osol, A. Ed. (1980).

[0674] The formulations to be used for in vivo administration must be sterile. This is readily accomplished, e.g., by filtration through sterile filtration membranes.

[0675] Sustained-release preparations may be prepared. Suitable examples of sustained-release preparations include semipermeable matrices of solid hydrophobic polymers containing the immunoglobulin of the invention, which matrices are in the form of shaped articles, e.g., films, or microcapsule. Examples of sustained-release matrices include polyesters, hydrogels (for example, poly(2-hydroxyethyl-methacrylate), or poly(vinylalcohol)), polylactides (U.S. Pat. No. 3,773,919), copolymers of L-glutamic acid and γ ethyl-L-glutamate, non-degradable ethylene-vinyl acetate, degradable lactic acid-glycolic acid copolymers such as the LUPRON DEPOT™ (injectable microspheres composed of lactic acid-glycolic acid copolymer and leuprolide acetate), and poly-D-(−)-3-hydroxybutyric acid. While polymers such as ethylene-vinyl acetate and lactic acid-glycolic acid enable release of molecules for over 100 days, certain hydrogels release proteins for shorter time periods. When encapsulated immunoglobulins remain in the body for a long time, they may denature or aggregate as a result of exposure to moisture at 37° C., resulting in a loss of biological activity and possible changes in immunogenicity. Rational strategies can be devised for stabilization depending on the mechanism involved. For example, if the aggregation mechanism is discovered to be intermolecular S—S bond formation through thio-disulfide interchange, stabilization may be achieved by modifying sulfhydryl residues, lyophilizing from acidic solutions, controlling moisture content, using appropriate additives, and developing specific polymer matrix compositions.

Uses

[0676] An antibody of the present invention may be used in, for example, in vitro, ex vivo and in vivo therapeutic methods. Antibodies of the invention can be used as an antagonist to partially or fully block the specific antigen activity in vitro, ex vivo and/or in vivo. Moreover, at least some of the antibodies of the invention can neutralize antigen activity from other species. Accordingly, the antibodies of the invention can be used to inhibit a specific antigen activity, e.g., in a cell culture containing the antigen, in human subjects or in other mammalian subjects having the antigen with which an antibody of the invention cross-reacts (e.g. chimpanzee, baboon, marmoset, cynomolgus and rhesus, pig or mouse). In one embodiment, the antibody of the invention can be used for inhibiting antigen activities by contacting the antibody with the antigen such that antigen activity is inhibited. In certain embodiments, the antigen is a human protein molecule.

[0677] In one embodiment, an antibody of the invention can be used in a method for inhibiting an antigen in a subject suffering from a disorder in which the antigen activity is detrimental, comprising administering to the subject an antibody of the invention such that the antigen activity in the subject is inhibited. In certain embodiments, the antigen is a human protein molecule and the subject is a human subject. Alternatively, the subject can be a mammal expressing the antigen with which an antibody of the invention binds. Still further the subject can be a mammal into which the antigen has been introduced (e.g., by administration of the antigen or by expression of an antigen transgene). An antibody of the invention can be administered to a human subject for therapeutic purposes. Moreover, an antibody of the invention can be administered to a non-human mammal expressing an antigen with which the immunoglobulin cross-reacts (e.g., a primate, pig or mouse) for veterinary purposes or as an animal model of human disease. Regarding the latter, such animal models may be useful for evaluating the therapeutic efficacy of antibodies of the invention (e.g., testing of dosages and time courses of administration). Blocking antibodies of the invention that are therapeutically useful include, for example but are not limited to, anti-VEGF and anti-insulin antibodies. For example, the anti-VEGF antibodies of the invention can be used to treat, inhibit, delay progression of, prevent/delay recurrence of, ameliorate, or prevent diseases, disorders or conditions associated with abnormal expression and/or activity of one or more antigen molecules, including but not limited to malignant and benign tumors; non-leukemias and lymphoid malignancies; neuronal, glial, astrocytal, hypothalamic and other glandular, macrophagal, epithelial, stromal and blastocoelic disorders; and inflammatory, angiogenic and immunologic disorders. As another example, the anti-insulin antibodies of the invention can be used to treat, inhibit, delay progression of, prevent/delay recurrence of, ameliorate, or prevent one or more insulin-related disorders (see, e.g., U.S. Patent Application Publication No. US20020081300, describing treating diabetes by administering anti-insulin antibodies in conjunction with anti-glutamic acid decarboxylase antibodies).

[0678] In one aspect, a blocking antibody of the invention is specific to a ligand antigen, and inhibits the antigen activity by blocking or interfering with the ligand-receptor interaction involving the ligand antigen, thereby inhibiting the corresponding signal pathway and other molecular or cellular events. The invention also features receptor-specific antibodies which do not necessarily prevent ligand binding but interfere with receptor activation, thereby inhibiting any responses that would normally be initiated by the ligand binding. In certain embodiments, the invention also encompasses antibodies that either preferably or exclusively bind to ligand-receptor complexes. An antibody of the invention can also act as an agonist of a particular antigen receptor, thereby potentiating, enhancing or activating either all or partial activities of the ligand-mediated receptor activation.

[0679] In certain embodiments, an immunoconjugate comprising an antibody conjugated with a cytotoxic agent is administered to the patient. In some embodiments, the immunoconjugate and/or antigen to which it is bound is/are internalized by the cell, resulting in increased therapeutic efficacy of the immunoconjugate in killing the target cell to which it binds. In one embodiment, the cytotoxic agent targets or interferes with nucleic acid in the target cell. Examples of such cytotoxic agents include any of the chemotherapeutic agents noted herein (such as a maytansinoid or a calicheamicin), a radioactive isotope, or a ribonuclease or a DNA endonuclease.

[0680] Antibodies of the invention can be used either alone or in combination with other compositions in a therapy. For instance, an antibody of the invention may be co-administered with another antibody, chemotherapeutic agent(s) (including cocktails of chemotherapeutic agents), other cytotoxic agent(s), anti-angiogenic agent(s), cytokines, and/or growth inhibitory agent(s). Where an antibody of the invention inhibits tumor growth, it may be particularly desirable to combine it with one or more other therapeutic agent(s) which also inhibits tumor growth. For instance, an antibody of the invention may be combined with an anti-VEGF antibody (e.g., AVASTIN) and/or anti-ErbB antibodies (e.g. HERCEPTIN™ anti-HER2 antibody) in a treatment scheme, e.g. in treating any of the diseases described herein, including colorectal cancer, metastatic breast cancer and kidney cancer. Alternatively, or additionally, the patient may receive combined radiation therapy (e.g. external beam irradiation or therapy with a radioactive labeled agent, such as an antibody). Such combined therapies noted above include combined administration (where the two or more agents are included in the same or separate formulations), and separate administration, in which case, administration of the antibody of the invention can occur prior to, and/or following, administration of the adjunct therapy or therapies.

[0681] The antibody of the invention (and adjunct therapeutic agent) is/are administered by any suitable means, including parenteral, subcutaneous, intraperitoneal, intrapulmonary, and intranasal, and, if desired for local treatment, intralesional administration. Parenteral infusions include intramuscular, intravenous, intraarterial, intraperitoneal, or subcutaneous administration. In addition, the antibody is suitably administered by pulse infusion, particularly with declining doses of the antibody. Dosing can be by any suitable route, for example by injections, such as intravenous or subcutaneous injections, depending in part on whether the administration is brief or chronic.

[0682] The antibody composition of the invention will be formulated, dosed, and administered in a fashion consistent with good medical practice. Factors for consideration in this context include the particular disorder being treated, the particular mammal being treated, the clinical condition of the individual patient, the cause of the disorder, the site of delivery of the agent, the method of administration, the scheduling of administration, and other factors known to medical practitioners. The antibody need not be, but is optionally formulated with one or more agents currently used to prevent or treat the disorder in question. The effective amount of such other agents depends on the amount of antibodies of the invention present in the formulation, the type of disorder or treatment, and other factors discussed above. These are generally used in the same dosages and with administration routes as used hereinbefore or about from 1 to 99% of the heretofore employed dosages.

[0683] For the prevention or treatment of disease, the appropriate dosage of an antibody of the invention (when used alone or in combination with other agents such as chemotherapeutic agents) will depend on the type of disease to be treated, the type of antibody, the severity and course of the disease, whether the antibody is administered for preventive or therapeutic purposes, previous therapy, the patient's clinical history and response to the antibody, and the discretion of the attending physician. The antibody is suitably administered to the patient at one time or over a series of treatments. Depending on the type and severity of the disease, about 1 μg/kg to 15 mg/kg (e.g. 0.1 mg/kg-10 mg/kg) of antibody is an initial candidate dosage for administration to the patient, whether, for example, by one or more separate administrations, or by continuous infusion. One typical daily dosage might range from about 1 μg/kg to 100 mg/kg or more, depending on the factors mentioned above. For repeated administrations over several days or longer, depending on the condition, the treatment is sustained until a desired suppression of disease symptoms occurs. One exemplary dosage of the antibody would be in the range from about 0.05 mg/kg to about 10 mg/kg. Thus, one or more doses of about 0.5 mg/kg, 2.0 mg/kg, 4.0 mg/kg or 10 mg/kg (or any combination thereof) may be administered to the patient. Such doses may be administered intermittently, e.g. every week or every three weeks (e.g. such that the patient receives from about two to about twenty, e.g. about six doses of the antibody). An initial higher loading dose, followed by one or more lower doses may be administered. An exemplary dosing regimen comprises administering an initial loading dose of about 4 mg/kg, followed by a weekly maintenance dose of about 2 mg/kg of the antibody. However, other dosage regimens may be useful. The progress of this therapy is easily monitored by conventional techniques and assays.

Articles of Manufacture

[0684] In another aspect of the invention, an article of manufacture containing materials useful for the treatment, prevention and/or diagnosis of the disorders described above is provided. The article of manufacture comprises a container and a label or package insert on or associated with the container. Suitable containers include, for example, bottles, vials, syringes, etc. The containers may be formed from a variety of materials such as glass or plastic. The container holds a composition which is by itself or when combined with another composition effective for treating, preventing and/or diagnosing the condition and may have a sterile access port (for example the container may be an intravenous solution bag or a vial having a stopper pierceable by a hypodermic injection needle). At least one active agent in the composition is an antibody of the invention. The label or package insert indicates that the composition is used for treating the condition of choice, such as cancer. Moreover, the article of manufacture may comprise (a) a first container with a composition contained therein, wherein the composition comprises an antibody of the invention; and (b) a second container with a composition contained therein, wherein the composition comprises a further cytotoxic agent. The article of manufacture in this embodiment of the invention may further comprise a package insert indicating that the first and second antibody compositions can be used to treat a particular condition, for example cancer. Alternatively, or additionally, the article of manufacture may further comprise a second (or third) container comprising a pharmaceutically-acceptable buffer, such as bacteriostatic water for injection (BWFI), phosphate-buffered saline, Ringer's solution and dextrose solution. It may further include other materials desirable from a commercial and user standpoint, including other buffers, diluents, filters, needles, and syringes.

[0685] Having generally described the invention, the same will be more readily understood by reference to the following examples, which are provided by way of illustration and are not intended as limiting.

### EXAMPLE 1

### Construction of Phage-Displayed Fab Libraries with CDR Residues Enriched in Tyr or Ser

[0686] Phage-displayed Fab libraries were constructed using the “Fab-C” phagemid vector that resulted in the display of bivalent Fab moieties dimerized by a free cysteine inserted between the Fab heavy chain and the C-terminal domain of the gene-3 minor coat protein (P3C). This vector was constructed as described in U.S. Patent Application Publication No. US20050119455 and in Lee et al., J. Immunol. Meth. 284: 119-132 (2004). The vector (schematically illustrated in FIG. 5) comprises the humanized antibody 4D5 variable domains under the control of the IPTG-inducible Ptac promoter. The humanized antibody 4D5 has mostly human consensus sequence framework regions in the heavy and light chains, and CDR regions from a mouse monoclonal antibody specific for Her-2. Methods of making the anti-Her-2 antibody and the identity of the variable domain sequences are provided in U.S. Pat. Nos. 5,821,337 and 6,054,297.

[0687] Two libraries were constructed, the YS-C library and the YS-D library. Both libraries were constructed with randomized residues in all three heavy chain CDRs and light chain CDR3. The CDR amino acid positions randomized in each library are shown in FIG. 6. The type and ratio of the amino acids allowed at each of the randomized positions is described in FIG. 7.

[0688] In addition, the lengths of CDRH3 and CDRL3 were varied. The length of CDRH3 was varied by using oligonucleotides that replaced the seven wild-type codons from positions 95 to 100a with six to seventeen codons. Thus, in certain instances, the codon corresponding to position 100a of the heavy chain was not present (for example, when the mutagenesis was performed with mutagenic oligonucleotides H3-C6 (SEQ ID NO: 13) or H3-D6 (SEQ ID NO: 25), as described below.) The type and ratio of the amino acids allowed at these positions were the same as those described in FIG. 7 for positions 95 to 100a of the heavy chain. The length of CDRL3 was varied by using oligonucleotides that replaced the four wild-type codons from positions 91 to 94 with four to six codons. The type and ratio of the amino acids allowed at these positions were the same as the ones described in FIG. 7 for positions 91 to 94 of the light chain.

[0689] Libraries were constructed using the method of Kunkel (Kunkel, T. A., Roberts, J. D. & Zakour, R. A., Methods Enzymol. (1987), 154, 367-382) with previously described methods (Sidhu, S. S., Lowman, H. B., Cunningham, B. C. & Wells, J. A., Methods Enzymol. (2000), 328, 333-363). A unique “stop template” version of the Fab display vector was used to generate both libraries YS-C and YS-D. A template phagemid based on the Fab-C vector further comprising TAA stop codons inserted at positions 30, 33, 52, 54, 56, 57, 60, 102, 103, 104, 107, and 108 of the heavy chain and substitutions of wild-type amino acids by a serine residue at positions 28, 30, 31, 32, 50, and 53 of the light chain was used to perform the mutagenesis. (See U S. Patent Application Publication No. US20050119455 and Lee et al., J. Immunol. Meth. 284: 119-132 (2004) for description of the Fab-C vector). No stop codons were introduced in the light chain CDR3.

[0690] Mutagenic oligonucleotides with degenerate codons at the positions to be diversified were used to simultaneously (a) introduce CDR diversity and (b) repair the stop codons. The sequences of those mutagenic oligonucleotides are shown in FIGS. 8A and 8B. For both libraries, diversity was introduced into CDR-H1 and CDR-H2 with oligonucleotides H1 and H2, respectively (SEQ ID NOS: 8 and 9). For both libraries, diversity was introduced into CDR-L3 with an equimolar mixture of oligonucleotides L3a, L3b, and L3c (SEQ ID NOS: 10-12). For library YS-C, diversity was introduced into CDR-H3 with an equimolar mixture of oligonucleotides H3-C6, H3-C7, H3-C8, H3-C9, H3-C10, H3-C11, H3-C12, H3-C13, H3-C14, H3-C15, H3-C16, and H3-C17 (SEQ ID NOS: 13-24). For library YS-D, diversity was introduced into CDR-H3 with an equimolar mixture of oligonucleotides H3-D6, H3-D7, H3-D8, H3-D9, H3-D10, H3-D11, H3-D12, H3-D13, H3-D14, H3-D15, H3-D16, and H3-D17 (SEQ ID NOS: 25-36). Each of mutagenic oligonucleotides H3-C6 to H3-C17 (SEQ ID NOS: 13-24) and H3-D6 to H3-D17 (SEQ ID NOS: 25-36) encoded an alanine at position 93 of the heavy chain. The mutagenic oligonucleotides for all CDRs to be randomized were incorporated simultaneously in a single mutagenesis reaction, so that simultaneous incorporation of all the mutagenic oligonucleotides resulted in the introduction of the designed diversity at each position and simultaneously repaired all the TAA stop codons. Thus, an open reading frame was generated that encoded a Fab library member fused to a homodimerizing cysteine bridge and P3C.

[0691] The mutagenesis reactions were electroporated into E. coli SS320 (Sidhu et al., supra). The transformed cells were grown overnight in the presence of M13-K07 helper phage (New England Biolabs, Beverly, Mass.), to produce phage particles that encapsulated the phagemid DNA and displayed Fab fragments on their surfaces. Each library contained greater than 3×10¹⁰ unique members.

### EXAMPLE 2

### Selection of Specific Antibodies from the Naïve Libraries YS-C and YS-D

[0692] Phage from library YS-C or YS-D (see Example 1) were cycled through rounds of binding selection to enrich for clones binding to human VEGF. The binding selections were conducted using previously described methods (Sidhu et al., supra).

[0693] NUNC 96-well Maxisorp immunoplates were coated overnight at 4° C. with 5 μg/mL human VEGF and blocked for 2 h with a solution of PBT (phosphate buffered saline additionally containing 0.2% BSA and 0.05% Tween-20) (Sigma). After overnight growth at 37° C., phage were concentrated by precipitation with PEG/NaCl and resuspended in PBT, as described previously (Sidhu et al., supra). Phage solutions (about 10¹² phage/mL) were added to the coated immunoplates. Following a two hour incubation to permit phage binding, the plates were washed ten times with PBT. Bound phage were eluted with 0.1 M HCl for 10 minutes and the eluant was neutralized with 1.0 M Tris base. Eluted phage were amplified in E. coli XL1-blue and used for further rounds of selection.

[0694] The libraries were subjected to five rounds of selection against each target protein. Individual clones from each round of selection were grown in a 96-well format in 500 μL of 2YT broth supplemented with carbenicillin and M13-K07. The culture supernatants were used directly in phage ELISAs (Sidhu et al., supra) to detect phage-displayed Fabs that bound to plates coated with target protein but not to plates coated with BSA. “Specific binders” were defined as those phage clones that exhibited an ELISA signal at least 15-fold greater on target-coated plates in comparison with their signal on BSA-coated plates. Individual clones were screened after four and five rounds of selection for binding to human VEGF and were subjected to sequence analysis. As shown in FIG. 9, both library YS-C and library YS-D produced specific binders against human VEGF. Library YS-D also produced both non-specific binders (binders that bound to both BSA and VEGF) that were not produced by the YS-C library and nine clones that did not bind to either VEGF or to BSA.

[0695] The CDRH1, CDRH2, CDRH3, and CDRL3 sequences for the unique specific binders are shown in FIG. 10. For CDRH3 and CDRL3, where randomization included diversification of length (see Example 1 and FIG. 7), the length of CDRH3 and CDRL3 varied from clone to clone. Thus, originally randomized positions 100b and 100c in CDRH3 appear in FIG. 10 at different Kabat positions depending on the number of amino acid insertions in that particular CDRH3, but always immediately precede invariant positions 101 and 102 (Asp and Tyr, respectively) in any given CDRH3. Similarly, additional length diversity in CDRL3 is shown in FIG. 10 at positions 94a and 94b of CDRL3.

[0696] The affinity of each of the unique Fab-expressing phages obtained from the YS-C and YS-D libraries was estimated by a two-spot phage ELISA. A single-point competitive phage ELISA was used to estimate the affinities of phage-displayed Fabs, as follows. Phage were produced in a 96-well format as described, and phage supernatants were diluted fivefold in PBT buffer or PBT buffer including 100 nM or 1000 nM human VEGF. The mixtures were incubated for 1 hour, transferred to plates coated with human VEGF and the plates were incubated for 15 minutes. The plates were washed with PBS including 0.05% Tween 20 and were incubated for 30 minutes with horseradish peroxidase/anti-M13 antibody conjugate (1:5000 dilution in PT buffer) (Pharmacia). The plates were washed, developed with tetramethylbenzidine (TMB) substrate (Kirkegaard and Perry Laboratories) and quenched with 1.0 M H₃PO₄. Absorbance was determined spectrophotometrically at 450 nm. The fraction of Fab-phage uncomplexed with solution-phase human VEGF was calculated by dividing the A450 in the presence of 100 nM or 1000 nM human VEGF by the A450 in the absence of human VEGF. The results are shown in FIG. 10.

[0697] Based on this analysis, soluble Fab proteins from the 12 clones that were ranked as the highest affinity binders by the phage ELISA analysis (showing the lowest fraction of uncomplexed Fab-phage after incubation with 1000 nM of hVEGF) were purified and subjected to surface plasmon resonance analysis of binding to human VEGF. BIAcore data was obtained according to Chen et al., J. Mol. Biol. (1999), 293(4): 865-81. Briefly, binding affinities of the purified Fabs for human VEGF were calculated from association and dissociation rate constants measured using a BIAcore™-2000 surface plasmon resonance system (BIACORE, Inc., Piscataway, N.J.). VEGF was covalently coupled to a biosensor chip using N-ethyl-N′-(3-dimethylaminopropyl)-carbodiimide hydrochloride (EDC) and N-hydroxysuccinimide (NHS) according to the supplier's (BIAcore, Inc., Piscataway, N.J.) instructions. Human VEGF was buffer-exchanged into 10 mM sodium acetate, pH 4.8 and diluted to approximately 30 μg/ml. Aliquots of VEGF were injected at a flow rate of 2 μL/min to achieve approximately 200-300 response units (RU) of coupled protein. A solution of 1 M ethanolamine was injected as a blocking agent. For kinetics measurements, twofold serial dilutions of each Fab were injected in PBT at 25° C. at a flow rate of 10 μL/minute. The kₒₙ and k_{off} values were determined from the binding curves using the BIAevaluation software package (BIACORE, Inc., Piscataway, N.J.). The equilibrium dissociation constant, K_{D}, was calculated as K_{off}/kₒₙ. The BIACORE data is summarized in FIG. 10. The language “N.D.B.” denotes that there was no detectable binding for the indicated Fab.

### EXAMPLE 3

### Construction of Phage-Displayed Fab Libraries with CDR Residues Enriched in Tyr, Ser, Gly, and Arg

[0698] Phage-displayed Fab libraries were constructed using a phagemid vector, Fab-C, that resulted in the display of bivalent Fab moieties dimerized by a free cysteine inserted between the Fab heavy chain and the C-terminal domain of the gene-3 minor coat protein (P3C), as previously described in Example 1.

[0699] Four libraries were constructed: YSGR-A, YSGR-B, YSGR-C, and YSGR-D. The libraries were constructed with randomized residues in all three heavy chain CDRs and light chain CDR3. Each library was randomized at positions 91-94 and 96 of CDRL3, positions 28 and 30-33 of CDRH1, positions 50, 52-54, 56, and 58 of CDRH2, and positions 95-100, 100a, 100b, and 100c of CDRH3. The type and ratio of the amino acids allowed at each of the randomized positions is described in FIG. 11. In addition, the length of CDRH3 was varied by using oligonucleotides that replaced the seven wild-type codons from positions 95 to 100a with six to seventeen codons. Thus, in certain instances, the codon corresponding to position 100a of the heavy chain was not present (for example, when the mutagenesis was performed with mutagenic oligonucleotides H3-A6 (SEQ ID NO: 161), H3-B6 (SEQ ID NO: 173), H3-C6 (SEQ ID NO: 185) or H3-D6 (SEQ ID NO: 197), as described below.) The type and ratio of the amino acids allowed at those positions were the same as the ones described in FIG. 11 for positions 95-100a of CDRH3.

[0700] Libraries were constructed using the method of Kunkel (Kunkel, T. A., Roberts, J. D. & Zakour, R. A., Methods Enzymol. (1987), 154, 367-382) with previously described methods (Sidhu, S. S., Lowman, H. B., Cunningham, B. C. & Wells, J. A., Methods Enzymol. (2000), 328, 333-363). A unique “stop template” version of the Fab display vector Fab-C was used to generate all four libraries, as described in Example 1.

[0701] Mutagenic oligonucleotides with degenerate codons at the positions to be diversified were used to simultaneously (a) introduce CDR diversity and (b) repair the stop codons. The sequences of those mutagenic oligonucleotides are shown in FIGS. 12A-12D. For all libraries, diversity was introduced into CDR-H1, CDR-H2, and CDR-H3 with oligonucleotides H1, H2 and L3, respectively (SEQ ID NOS: 158, 159, and 160). For library YSGR-A, diversity was introduced into CDR-H3 with an equimolar mixture of oligonucleotides H3-A6, H3-A7, H3-A8, H3-A9, H3-A10, H3-A11, H3-A12, H3-A13, H3-A14, H3-A15, H3-A16, and H3-A17 (SEQ ID NOS: 161-172). For library YSGR-B, diversity was introduced into CDR-H3 with an equimolar mixture of oligonucleotides H3-B6, H3-B7, H3-B8, H3-B9, H3-B10, H3-B11, H3-B12, H3-B13, H3-B14, H3-B15, H3-B16, and H3-B17 (SEQ ID NOS: 173-184). For library YSGR-C, diversity was introduced into CDR-H3 with an equimolar mixture of oligonucleotides H3-C6, H3-C7, H3-C8, H3-C9, H3-C10, H3-C11, H3-C12, H3-C13, H3-C14, H3-C15, H3-C16, and H3-C17 (SEQ ID NOS: 185-196). For library YSGR-D, diversity was introduced into CDR-H3 with an equimolar mixture of oligonucleotides H3-D6, H3-D7, H3-D8, H3-D9, H3-D10, H3-D11, H3-D12, H3-D13, H3-D14, H3-D15, H3-D16, and H3-D17 (SEQ ID NOS: 197-208). Each of mutagenic oligonucleotides H3-A6 to H3-A17 (SEQ ID NOS: 161-172), H3-B6 to H3-B17 (SEQ ID NOS: 173-184), H3-C6 to H3-C17 (SEQ ID NOS: 185-196) and H3-D6 to H3-D17 (SEQ ID NOS: 197-208) encoded an alanine at position 93 of the heavy chain. The mutagenic oligonucleotides for all CDRs to be randomized were incorporated simultaneously in a single mutagenesis reaction, so that simultaneous incorporation of all the mutagenic oligonucleotides resulted in the introduction of the designed diversity at each position and simultaneously repaired all the TAA stop codons. Thus, an open reading frame was generated that encoded a Fab library member fused to a homodimerizing cysteine bridge and P3C. Following mutagenesis, the four libraries were combined to create a single library, called library YSGR-A-D.

[0702] The mutagenesis reactions were electroporated into E. coli SS320 (Sidhu et al., supra). The transformed cells were grown overnight in the presence of M13-KO7 helper phage (New England Biolabs, Beverly, Mass.) to produce phage particles that encapsulated the phagemid DNA and displayed Fab fragments on their surfaces. The combined library contained greater than 3×10¹⁰ unique members.

### EXAMPLE 4

### Selection of Specific Antibodies from Naïve Library YSGR-A-D

[0703] Phage from library YSGR-A-D (described in Example 3, above) were cycled through rounds of binding selection to enrich for clones binding to human VEGF or human insulin. The binding selections were conducted using previously described methods (Sidhu et al., supra).

[0704] NUNC 96-well Maxisorp immunoplates were coated overnight at 4° C. with 5 μg/mL target protein (human VEGF or human insulin) and blocked for 2 hours with a solution of PBT (phosphate buffered saline additionally containing 0.2% BSA and 0.05% Tween 20 (Sigma)). After overnight growth at 37° C., phage were concentrated by precipitation with PEG/NaCl and resuspended in PBT, as described previously (Sidhu et al., supra). Phage solutions (about 10¹² phage/mL) were added to the coated immunoplates. Following a two hour incubation to permit phage binding, the plates were washed ten times with PBT. Bound phage were eluted with 0.1 M HCl for ten minutes and the eluant was neutralized with 1.0 M Tris base. Eluted phage were amplified in E. coli XL1-blue and used for further rounds of selection.

[0705] The libraries were subjected to five rounds of selection against each target protein. Individual clones from each round of selection were grown in a 96-well format in 500 μL of 2YT broth supplemented with carbenicillin and M13-K07. The culture supematants were used directly in phage ELISAs (Sidhu et al., supra) to detect phage-displayed Fabs that bound to plates coated with target protein but not to plates coated with BSA. Specific binders were defined as those phage clones that exhibited an ELISA signal at least 10-fold greater on target-coated plates in comparison with BSA-coated plates. Individual clones were screened after 4 and 5 rounds of selection for binding to human VEGF or human insulin. The specific binders were subjected to sequence analysis. As shown in FIG. 13, the YSGR-A-D library produced specific binders against both target proteins.

[0706] Of the 240 clones identified that specifically bound to human VEGF, 122 of them had unique CDR sequences (see FIG. 13). Those unique sequences are shown in FIGS. 14A-14C. The unique sequences fell into three categories: (a) CDR sequences with randomized positions limited to binary Tyr/Ser (14 of 122 sequences, clone numbers 1-14); (b) CDR sequences with randomized positions limited to Tyr/Ser/Gly/Arg sequences (84 of 122 sequences, clone numbers 15-98); and (c) CDR sequences with randomized positions having amino acid usages that did not readily fall into either of the other two categories (24 of 122 sequences, clone numbers 99-122). A comparison of the binary Tyr/Ser category sequences (clone numbers 1-14) and the YSGR category sequences (clone numbers 15-45) shows that the preponderance of sequences in both categories comprise Tyr at positions 32 of CDRH1, 53, 54, and 56 of CDRH2, and 95-97 and 99 of CDRH3, and Ser at positions 33 of CDRH1, 50, 52, and 58 of CDRH2, and 98 of CDRH3.

[0707] As shown in FIG. 13, 170 clones were identified that expressed Fabs that were specific binders for insulin. Sequence analysis identified 105 unique amino acid sequences from those 170 clones, shown in FIGS. 15A and 15B. The unique sequences fell into three categories: (a) CDRH3 sequences with Tyr-rich randomized positions (58 of 105 sequences, clone nos. 1-58); (b) CDRH3 sequences with randomized positions limited to Tyr/Ser/Gly/Arg sequences (35 of 105 sequences, clones 59-93); and (c) CDRH3 sequences with Tyr/Ser/Arg/Gly/X at the randomized positions (12 of 105 sequences, clones 94-105). A comparison of the TyT-rich category sequences (clone nos. 1-61) and the YSGRX category sequences (clone nos. 62-73) shows that the preponderance of sequences in both categories comprise Ser at position 33 of CDRH1 and Tyr at positions 98 and 100e of CDRH3.

[0708] In the CDRH3 sequences shown in both FIGS. 14A-C and FIGS. 15A and 15B, the length of CDRH3 varied from clone to clone due to the length diversification within that CDR (see Example 3 and FIG. 11). Thus, originally randomized positions 100b and 100c in CDRH3 appear in FIGS. 14A-C and 15A-15B at different Kabat positions depending on the number of amino acid insertions in that particular CDRH3, but always immediately precede invariant positions 101 and 102 (Asp and Tyr, respectively) in any given CDRH3.

[0709] A phage ELISA was used to test the ability of all clones to cross-react with a panel of six antigens other than the target antigen. Phage were produced in a 96-well format as described and phage supernatants were diluted 3-fold in PBT buffer. The diluted phage supernatant was transferred to plates coated with human VEGF, HER2, human DR5, human insulin, neutravidin, human IGF-1, HGH, or BSA, and incubated for one hour with gentle shaking at room temperature. The plates were washed with PBS including 0.05% Tween 20, and were incubated for 30 minutes with horseradish peroxidase/anti-M13 antibody conjugate (diluted 1:5000 in PT buffer) (Pharmacia). The plates were washed, developed with tetramethylbenzidine (TMB) substrate (Kirkegaard and Perry Laboratories) and quenched with 1.0 M H₃PO₄. Absorbance was determined spectrophotometrically at 450 nm. Weak cross-reactivity was defined as a signal between 0.25-2.0 and strong cross-reactivity was defined as a signal about 2.0. The results for all YSGR-A-D clones are shown in FIGS. 14D-F and FIGS. 15C and 15D. A single-point competitive phage ELISA (“spot affinity ELISA”) was used to roughly estimate the affinities of phage-displayed Fabs. Phage were produced in a 96-well format as described, and phage supematants were diluted five fold in PBT buffer or PBT buffer with 100 nM human VEGF, 100 nM HER2 or 200 nM human insulin. The mixtures were incubated for 1 hour, then transferred to plates coated with human VEGF, HER2, or human insulin and incubated for 15 minutes. The plates were washed with PBS including 0.05% Tween 20, and were incubated for 30 minutes with horseradish peroxidase/anti-M13 antibody conjugate (diluted 1:5000 in PT buffer) (Pharmacia). The plates were washed, developed with tetramethylbenzidine (TMB) substrate (Kirkegaard and Perry Laboratories) and quenched with 1.0 M H₃PO₄. Absorbance was determined spectrophotometrically at 450 nm. The fraction of Fab-phage uncomplexed with solution-phase human VEGF, HER2, or human insulin was calculated by dividing the A450 in the presence of antigen by the A₄₅₀ in the absence of antigen. The results are shown in FIGS. 14D-F and FIGS. 15C-15D.

[0710] A competitive phage ELISA was used to estimate the binding affinities of some VEGF-binding phage-displayed Fabs. Phage were produced in a 96-well format as described, and phage supernatants were serially diluted in PBT buffer, then incubated on plates coated with human VEGF for 15 minutes. The plates were washed with PBS including 0.05% Tween 20 and were incubated for 30 minutes with horseradish peroxidase/anti-M13 antibody conjugate (diluted 1:5000 in PT buffer) (Pharmacia). The plates were washed, developed with tetramethylbenzidine (TMB) substrate (Kirkegaard and Perry Laboratories) and quenched with 1.0 M H₃PO₄. Absorbance was measured spectrophotometrically at 450 nm to determine the phage concentration giving about 50% of the signal at saturation. A fixed, sub-saturating concentration of phage was diluted two fold in PBT buffer or PBT buffer containing two-fold serial dilutions of human VEGF protein from 500 nM human VEGF to 0.24 nM human VEGF. The mixtures were incubated for one hour with gentle shaking at room temperature, transferred to plates coated with human VEGF and the plates were incubated for 15 minutes. The plates were washed and treated exactly as above. The binding affinities were estimated as IC₅₀ values (defined as the concentration of antigen that blocked 50% of the phage binding to the immobilized antigen). The results are shown in FIGS. 14D-F.

### EXAMPLE 5

### Construction of Phage-Displayed Fab Libraries with CDRH1, H2, and L3 Residues Enriched in Tyr and Ser and CDRH3 Residues Enriched in Ser and Ala, Cys, Phe, Gly, Ile, Leu, Asn, Pro, Arg, Thr, Trp, or Tyr

[0711] Phage-displayed Fab libraries were constructed using a phagemid vector, Fab-C, that resulted in the display of bivalent Fab moieties dimerized by a free cysteine inserted between the Fab heavy chain and the C-terminal domain of the gene-3 minor coat protein (P3C), as previously described in Example 1.

[0712] Twelve libraries were constructed: SAH3, SCH3, SFH3, SGH3, SLH3, SNH3, SPH3, SRH3, STH3, SWH3, and SYH3. The libraries were constructed with randomized residues in all three heavy chain CDRs and light chain CDR3. Each library was randomized at positions 91-94 and 96 of CDRL3, positions 28 and 30-33 of CDRH1, positions 50, 52-54, 56, and 58 of CDRH2, and position 95-100, 101, and 102 of CDRH3. The type and ratio of the amino acids allowed at each of the randomized positions is described in FIGS. 18A-18B. In addition, the length of CDRH3 was varied by using oligonucleotides that replaced the six wild-type codons between positions 95 and 100 with 4 to 17 codons. The type and ratio of the amino acids allowed at those positions were the same as the ones described in FIGS. 18A-18B for positions 95-100 of CDRH3.

[0713] Libraries were constructed using the method of Kunkel (Kunkel et al., Methods Enzymol. (1987) 154: 367-382) with previously described methods (Sidhu et al., Methods Enzymol. (2000) 328: 333-363). A unique “stop template” version of the Fab display vector Fab-C was used to generate all four libraries, as described in Example 1.

[0714] Mutagenic oligonucleotides with degenerate codons at the positions to be diversified were used to simultaneously (a) introduce CDR diversity and (b) repair the stop codons. The sequences of those mutagenic oligonucleotides are shown in FIGS. 19A-19L. For all libraries, diversity was introduced into CDRH1, CDRH2, and CDRL3 with oligonucleotides H1, H2, and L3, respectively (SEQ ID NOS: 158, 159, and 160).

[0715] For library SAH3, diversity was introduced into CDRH3 with an equimolar mixture of oligonucleotides H3-SA4, H3-SA5, H3-SA6, H3-SA7, H3-SA8, H3-SA9, H3-SA10, H3-SA11, H3-SA12, H3-SA13, H3-SA14, H3-SA15, H3-SA16, and H3-SA17 (SEQ ID NOS: 1115-1128).

[0716] For library SCH3, diversity was introduced into CDRH3 with an equimolar mixture of oligonucleotides H3-SC4, H3-SC5, H3-SC6, H3-SC7, H3-SC8, H3-SC9, H3-SC10, H3-SC11, H3-SC12, H3-SC13, H3-SC14, H3-SC15, H3-SC16, and H3-SC17 (SEQ ID NOS: 1129-1142).

[0717] For library SFH3, diversity was introduced into CDR-H3 with an equimolar mixture of oligonucleotides H3-SF4, H3-SF5, H3-SF6, H3-SF7, H3-SF8, H3-SF9, H3-SF10, H3-SF11, H3-SF12, H3-SF13, H3-SF14, H3-SF15, H3-SF16, and H3-SF17 (SEQ ID NOS: 1143-1156).

[0718] For library SGH3, diversity was introduced into CDRH3 with an equimolar mixture of oligonucleotides H3-SG4, H3-SG5, H3-SG6, H3-SG7, H3-SG8, H3-SG9, H3-SG10, H3-SG11, H3-SG12, H3-SG13, H3-SG14, H3-SG15, H3-SG16, and H3-SG17 (SEQ ID NOS: 1157-11700.

[0719] For library SIH3, diversity was introduced into CDR-H3 with an equimolar mixture of oligonucleotides H3-SI4, H3-SI5, H3-SI6, H3-SI7, H3-SI8, H3-SI9, H3-SI10, H3-SI11, H3-SI12, H3-SI13, H3-SI14, H3-SI15, H3-SI16, and H3-SI17 (SEQ ID NOS: 1171-1184).

[0720] For library SLH3, diversity was introduced into CDR-H3 with an equimolar mixture of oligonucleotides H3-SL4, H3-SL5, H3-SL6, H3-SL7, H3-SL8, H3-SL9, H3-SL10, H3-SL11, H3-SL12, H3-SL13, H3-SL14, H3-SL15, H3-SL16, and H3-SL17 (SEQ ID NOS: 1185-1198).

[0721] For library SNH3, diversity was introduced into CDR-H3 with an equimolar mixture of oligonucleotides H3-SN4, H3-SN5, H3-SN6, H3-SN7, H3-SN8, H3-SN9, H3-SN10, H3-SN11, H3-SN12, H3-SN13, H3-SN14, H3-SN15, H3-SN16, and H3-SN17 (SEQ ID NOS: 1199-1212).

[0722] For library SPH3, diversity was introduced into CDR-H3 with an equimolar mixture of oligonucleotides H3-SP4, H3-SP5, H3-SP6, H3-SP7, H3-SP8, H3-SP9, H3-SP10, H3-SP11, H3-SP12, H3-SP13, H3-SP14, H3-SP15, H3-SP16, and H3-SP17 (SEQ ID NOS: 1213-1226).

[0723] For library SRH3, diversity was introduced into CDR-H3 with an equimolar mixture of oligonucleotides H3-SR4, H3-SR5, H3-SR6, H3-SR7, H3-SR8, H3-SR9, H3-SR10, H3-SR11, H3-SR12, H3-SR13, H3-SR14, H3-SR15, H3-SR16, and H3-SR17 (SEQ ID NOS: 1227-1240).

[0724] For library STH3, diversity was introduced into CDR-H3 with an equimolar mixture of oligonucleotides H3-ST4, H3-ST5, H3-ST6, H3-ST7, H3-ST8, H3-ST9, H3-ST10, H3-ST11, H3-ST12, H3-ST13, H3-ST14, H3-ST15, H3-ST16, and H3-ST17 (SEQ ID NOS: 1241-1254).

[0725] For library SWH3, diversity was introduced into CDR-H3 with an equimolar mixture of oligonucleotides H3-SW4, H3-SW5, H3-SW6, H3-SW7, H3-SW8, H3-SW9, H3-SW10, H3-SW11, H3-SW12, H3-SW13, H3-SW14, H3-SW15, H3-SW16, and H3-SW17 (SEQ ID NOS: 1255-1268).

[0726] For library SYH3, diversity was introduced into CDR-H3 with an equimolar mixture of oligonucleotides H3-SY4, H3-SY5, H3-SY6, H3-SY7, H3-SY8, H3-SY9, H3-SY10, H3-SY11, H3-SY12, H3-SY13, H3-SY14, H3-SY15, H3-SY16, and H3-SY17 (SEQ ID NOS: 1269-1282).

[0727] The mutagenic oligonucleotides for all CDRs to be randomized were incorporated in a single mutagenesis reaction, so that simultaneous incorporation of all the mutagenic oligonucleotides resulted in the introduction of the designed diversity at each position and repair of all of the TAA stop codons. Thus, an open reading frame was generated that encoded a Fab library member fused to a homodimerizing cysteine bridge and P3C. Following mutagenesis, the twelve libraries were combined to create a single library, called library SXH3.

[0728] The mutagenesis reactions were electroporated into E. coli SS320 (Sidhu et al., supra). The transformed cells were grown overnight in the presence of M13-K07 helper phage (New England Biolabs, Beverly, Mass.) to produce phage particles that encapsulated the phagemid DNA and displayed Fab fragments on their surfaces. The combined library contained greater than 3×10¹⁰ unique members.

### EXAMPLE 6

### Selection of Specific Antibodies from Naïve Library SXH3

[0729] Phage from library SXH3 (described in Example 5, above) were cycled through rounds of binding selection to enrich for clones binding to human VEGF, HER2, human insulin, human IGF-1, or HGH. The binding selections were conducted using previously described methods (Sidhu et al., supra).

[0730] NUNC 96-well Maxisorp immunoplates were coated overnight at 4° C. with 5 μg/mL target protein (human VEGF, HER2, human insulin, human IGF-1, or HGH) and blocked for two hours with a solution of PBT (Sigma). After overnight growth at 37° C., phage were concentrated by precipitation with PEG/NaCl and resuspended in PBT, as described previously (Sidhu et al., supra). Phage solutions (about 10¹² phage/mL) were added to the coated immunoplates. Following a two hour incubation to permit phage binding, the plates were washed ten times with PBT. Bound phage were eluted with 0.1M HCl for ten minutes and the eluant was neutralized with 1.0 M Tris base. Eluted phage were amplified in E. coli XL1-blue and used for further rounds of selection.

[0731] The libraries were subjected to six rounds of selection against each target protein. Individual clones from each round of selection were grown in a 96-well format in 500 μL of 2YT broth supplemented with carbenicillin and M13-K07. The culture supernatants were used directly in phage ELISAs (Sidhu et al., supra) to detect phage-displayed Fabs that bound to plates coated with target protein but not to plates coated with BSA. Specific binders were defined as those phage clones that exhibited an ELISA signal at least 10-fold greater on target-coated plates in comparison with BSA-coated plates. Individual clones were screened after 4, 5, and 6 rounds of selection for binding to human VEGF, HER2, human insulin, human IGF-1, or HGH. The specific binders were subjected to sequence analysis. As shown in FIG. 20, the SXH3 library produced specific binders to all five target proteins. The distribution of target-binding clones from each S:XH3 library is shown in FIG. 34 as well as the distribution of properly folded and displayed S:XH3 antibodies that bound to Protein A.

[0732] Of the 100 clones identified that specifically bound to human VEGF, 57 of them had unique CDR sequences (see FIGS. 21 A-21B). The unique sequences had randomized positions limited to binary Tyr/Ser (clone nos. A1-A60). The clones were also highly specific for VEGF and did not display significant cross-reactivity to five other control proteins: HER2, human DR5, human insulin, neutravidin, human IGF-1 or HGH (see FIGS. 21C-21D).

[0733] Of the 72 clones identified that specifically bound to HER2, 27 of them had unique CDR sequences (see FIG. 22A). The unique sequences fell into three categories: (1) CDR sequences with randomized positions limited to binary Tyr/Ser (clone nos. B1-5 and B28); (b) CDR sequences with randomized positions limited to binary Trp/Ser (clone nos. B6-24); (c) CDR sequences with randomized positions limited to binary Phe/Ser (clone nos. B25-27). These clones were also highly specific for HER2 and did not display cross-reactivity to five other control proteins, human VEGF, human DR5, human insulin, neutravidin, human IGF-1, or HGH (see FIG. 22B). The inhibitory concentration for each clone is shown in FIG. 22B.

[0734] Of the 106 clones identified that specifically bound to human insulin, 47 of them had unique CDR sequences (see FIGS. 23A-B). The unique sequences fell into three categories: (a) CDR sequences with randomized positions limited to binary Tyr/Ser (clone nos. C32-34); (b) CDR sequences with randomized positions limited to binary Trp/Ser (clone no. C19); and (c) CDR sequences with randomized positions limited to binary Arg/Ser (clone nos. C1-18 and C20-31). Additional clones C35 to C47 have been sequenced. The Arg/Ser clones bound with high affinity to human insulin but also displayed cross-reactivity to five other control proteins, human VEGF, HER2, human DR5, neutravidin, human IGF-1, or HGH (see FIG. 23C). The Trp/Ser clone and Tyr/Ser clones has less cross-reactivity than the Arg/Ser clones (FIG. 23C).

[0735] Of the 125 clones identified that specifically bound to human IGF-1, 116 of them had unique CDR sequences (see FIGS. 24A-B). The unique sequences fell into five categories: (a) CDR sequences with randomized positions limited to binary Tyr/Ser (clone nos. D51, D95, D96); (b) CDR sequences with randomized positions limited to binary Trp/Ser (clone nos. D50, D60-66, D75, D85-87); (c) CDR sequences with randomized positions limited to binary Arg/Ser (clone nos. D44-49, D52-57, D67-74, and D77-83); (d) CDR sequences with randomized positions limited to binary Phe/Ser (clone nos. D58, D59, D89-94); (e) CDR sequences with randomized positions limited to binary Pro/Ser (clone no. D84). Additional clones D99-D161 have been sequenced. These clones bound with high affinity to human IGF-1 but some clones did display cross-reactivity to five other control proteins, human VEGF, HER2, human DR5, human insulin, neutravidin, or HGH (see FIG. 24C).

[0736] Of the 21 clones identified that specifically bound to HGH, 8 of them had unique CDR sequences (see FIG. 25A). The unique sequences fell into two categories: (a) CDR sequences with randomized positions limited to binary Arg/Ser (clone nos. D37-43); (b) CDR sequences with randomized positions limited to binary Trp/Ser (clone nos. D35, D36). These clones bound to HGH with high affinity but did display cross-reactivity to five other control proteins, human VEGF, HER2, human DR5, human insulin, neutravidin, or human IGF-1 (see FIG. 25B).

[0737] A phage ELISA was used to test the ability of all clones to cross-react with a panel of six antigens other than the target antigen. Phage were produced in a 96-well format as described and phage supematants were diluted 3-fold in PBT buffer. The diluted phage supernatant was transferred to plates coated with human VEGF, HER2, human DR5, human insulin, neutravidin, human IGF-1, HGH, or BSA and incubated for one hour with gentle shaking at room temperature. The plates were washed with PBS including 0.05% Tween 20 and were incubated for 30 minutes with horseradish peroxidase/anti-M13 antibody conjugate (diluted 1:5000 in PT buffer) (Pharmacia). The plates were washed, developed with tetramethylbenzidine (TMB) substrate (Kirkegaard and Perry Laboratories) and quenched with 1.0 M H₃PO₄. Absorbance was determined spectrophotometrically at 450 nm. Weak cross-reactivity was defined as a signal between 0.2-2.0 and strong cross-reactivity was defined as a signal about 2.0. The results for all SXH3 clones are shown in FIGS. 21-25. As shown in FIG. 35, of the SXH3 clones isolated, the S:R clones displayed the greatest average non-specific binding (0.5-0.6 OD at 450 nm by ELISA assay), while the S:W, S:Y, and S:F clones each displayed similar low levels of average non-specific binding (0-0.1 OD at 450 nm by ELISA assay).

[0738] A single-point competitive phage ELISA was used to estimate the affinities of the obtained phage-displayed Fabs. Phage were produced in a 96-well format as described, and phage supematants were diluted fifteen-fold in PBT buffer or PBT buffer containing 300 nM human VEGF, human insulin, human IGF-1, or HGH. The mixtures were incubated for 1 hour, then transferred to plates coated with human VEGF, human insulin, human IGF-1 or HGH and incubated for 15 minutes. The plates were washed with PBS including 0.05% Tween 20, and were incubated for 30 minutes with horseradish/peroxidase/anti-M13 antibody conjugate (diluted 1:5000 in PT buffer) (Pharmacia). The plates were washed, developed with tetramethylbenzidine (TMB) substrate (Kirkegaard and Perry Laboratories) and quenched with 1.0 M H₃PO₄. Absorbance was determined spectrophotometrically at 450 nm. The fraction of Fab-phage uncomplexed with solution-phase human VEGF, human insulin, human IGF-1 or HGH was calculated by dividing the A450 in the presence of antigen by the A450 in the absence of antigen. The results are shown in FIGS. 21C-21D, FIG. 23C, FIG. 24C, and FIG. 25B.

[0739] A competitive phage ELISA was used to estimate the binding affinities of HER2-binding phage-displayed Fabs. Phage were produced in a 96-well format as described, and phage supernatants were serially diluted in PBT buffer, then incubated on plates coated with HER2 for 15 minutes. The plates were washed with PBS including 0.05% Tween 20 and were incubated for 30 minutes with horseradish peroxidase/anti-M13 antibody conjugate (diluted 1:5000 in PT buffer) (Pharmacia). The plates were washed, developed with tetramethylbenzidine (TMB) substrate (Kirkegaard and Perry Laboratories) and quenched with 1.0 M H₃PO₄. Absorbance was measured spectrophotometrically at 450 nm to determine the phage concentration giving about 50% of the signal at saturation. A fixed, sub-saturating concentration of phage was diluted two fold in PBT buffer or PBT buffer containing two-fold serial dilutions of HER2 protein from 250 nM HER2 to 0.12 nM HER2. The mixtures were incubated for one hour with gentle shaking at room temperature, transferred to plates coated with HER2 and the plates were incubated for 15 minutes. The plates were washed and treated exactly as above. The binding affinities were estimated as IC₅₀ values (defined as the concentration of antigen that blocked 50% of the phage binding to the immobilized antigen). The results are shown in FIG. 22B.

### EXAMPLE 7

### Construction of Phage-Displayed Fab Libraries with CDR Residues Enriched in Ser and Phe, Arg, Trp, or Tyr

[0740] Phage-displayed Fab libraries were constructed using a phagemid vector, Fab-C, that resulted in the display of bivalent Fab moieties dimerized by a free cysteine inserted between the Fab heavy chain and the C-terminal domain of the gene-3 minor coat protein (P3C), as previously described in Example 1.

[0741] Four libraries were constructed: SFH3, SRH3, SWH3, and SYH3. The libraries were constructed with randomized residues in all three heavy chain CDRs and light chain CDR3. Each library was randomized at positions 91-94 and 96 of CDRL3, positions 28 and 30-33 of CDRH1, positions 50, 52-54, 56, and 58 of CDRH2, and positions 95-100, 101, and 102 of CDRH3. The type and ratio of the amino acids allowed at each of the randomized positions is described in FIG. 26. In addition, the length of CDRH3 was varied by using oligonucleotides that replaced the six wild-type codons between positions 95 and 100 with 4 to 17 codons. The type and ratio of the amino acids allowed at those positions were the same as the ones described in FIG. 26 for positions 95-100 of CDRH3.

[0742] Libraries were constructed using the method of Kunkel (Kunkel, T. A., Roberts, J. D. & Zakour, R. A., Methods Enzymol. (1987), 154, 367-382) with previously described methods (Sidhu, S. S., Lowman, H. B., Cunningham, B. C. & Wells, J. A., Methods Enzymol. (2000), 328, 333-363). A unique “stop template” version of the Fab display vector Fab-C was used to generate all four libraries, as described in Example 1.

[0743] Mutagenic oligonucleotides with degenerate codons at the positions to be diversified were used to simultaneously (a) introduce CDR diversity and (b) repair the stop codons. The sequences of those mutagenic oligonucleotides are shown in FIGS. 19 and 27. For the library SF-surface, diversity was introduced into CDR-L3, CDR-H1 and CDR-H2 with the oligonucleotides L3-SF, H1-SF and H2-SF respectively (SEQ ID NOS: 1989, 1987, and 1988) (FIG. 27) and diversity was introduced into CDR-H3 with an equimolar mixture of oligonucleotides H3-SF4, H3-SF5, H3-SF6, H3-SF7, H3-SF8, H3-SF9, H3-SF10, H3-SF11, H3-SF12, H3-SF13, H3-SF14, H3-SF15, H3-SF16, and H3-SF17 (SEQ ID NOS: 1143-1156) (FIG. 19C).

[0744] For the library SR-surface, diversity was introduced into CDR-L3, CDR-H1 and CDR-H2 with the oligonucleotides L3-SR, H1-SR and H2-SR respectively (SEQ ID NOS: 1992, 1990, and 1991) (FIG. 27) and diversity was introduced into CDR-H3 with an equimolar mixture of oligonucleotides H3-SR4, H3-SR5, H3-SR6, H3-SR7, H3-SR8, H3-SR9, H3-SR10, H3-SR11, H3-SR12, H3-SR13, H3-SR14, H3-SR15, H3-SR16, and H3-SR17 (SEQ ID NOS: 1227-1240) FIG. 19I).

[0745] For the library SW-surface, diversity was introduced into CDR-L3, CDR-H1 and CDR-H2 with the oligonucleotides L3-SW, H1-SW and H2-SW respectively (SEQ ID NOS:1995, 1993 and 1994) (FIG. 27) and diversity was introduced into CDR-H3 with an equimolar mixture of oligonucleotides H3-SW4, H3-SW5, H3-SW6, H3-SW7, H3-SW8, H3-SW9, H3-SW10, H3-SW11, H3-SW12, H3-SW13, H3-SW14, H3-SW15, H3-SW16, and H3-SW17 (SEQ ID NOS: 1255-1268) (FIG. 19K).

[0746] For the library SY-surface, diversity was introduced into CDR-L3, CDR-H1 and CDR-H2 with the oligonucleotides L3, H1 and H2 respectively (SEQ ID NOS: 160, 158, and 159) (FIG. 19A) and diversity was introduced into CDR-H3 with an equimolar mixture of oligonucleotides H3-SY4, H3-SY5, H3-SY6, H3-SY7, H3-SY8, H3-SY9, H3-SY10, H3-SY11, H3-SY12, H3-SY13, H3-SY14, H3-SY15, H3-SY16, and H3-SY17 (SEQ ID NOS: 1269-1282) (FIG. 19L).

[0747] The mutagenic oligonucleotides for all CDRs to be randomized were incorporated in a single mutagenesis reaction, so that simultaneous incorporation of all the mutagenic oligonucleotides resulted in the introduction of the designed diversity at each position and repaired all the TAA stop codons. Thus, an open reading frame was generated that encoded a Fab library member fused to a homodimerizing cysteine bridge and P3C. Following mutagenesis, the four libraries were combined to create a single library, called library SX-surface.

[0748] The mutagenesis reactions were electroporated into E. coli SS320 (Sidhu et al., supra). The transformed cells were grown overnight in the presence of M13-KO7 helper phage (New England Biolabs, Beverly, Mass.) to produce phage particles that encapsulated the phagemid DNA and displayed Fab fragments on their surfaces. The combined library contained greater than 3×10¹⁰ unique members.

### EXAMPLE 8

### Selection of Specific Antibodies from Naive Library SX Surface

[0749] Phage from library SX-surface (described in Example 7, above) were cycled through rounds of binding selection to enrich for clones binding to human VEGF, HER2, human insulin, human IGF-1, or HGH. The binding selections were conducted using previously described methods (Sidhu et al., supra).

[0750] NUNC 96-well Maxisorp immunoplates were coated overnight at 4° C. with 5 μg/mL target protein (human VEGF, HER2, human insulin, human IGF-1, or HGH) and blocked for 2 hours with a solution of PBT (Sigma). After overnight growth at 37° C., phage were concentrated by precipitation with PEG/NaCl and resuspended in PBT, as described previously (Sidhu et al., supra). Phage solutions (about 10¹² phage/mL) were added to the coated immunoplates. Following a two hour incubation to permit phage binding, the plates were washed ten times with PBT. Bound phage were eluted with 0.1 M HCl for ten minutes and the eluant was neutralized with 1.0 M Tris base. Eluted phage were amplified in E. coli XL1-blue and used for further rounds of selection. The libraries were subjected to six rounds of selection against each target protein. Individual clones from each round of selection were grown in a 96-well format in 500 μL of 2YT broth supplemented with carbenicillin and M13-K07. The culture supematants were used directly in phage ELISAs (Sidhu et al., supra) to detect phage-displayed Fabs that bound to plates coated with target protein but not to plates coated with BSA. Specific binders were defined as those phage clones that exhibited an ELISA signal at least 10-fold greater on target-coated plates in comparison with BSA-coated plates. Individual clones were screened after 4, 5 and 6 rounds of selection for binding to human VEGF, HER2, human insulin, human IGF-1, or HGH. The specific binders were subjected to sequence analysis. As shown in FIG. 20, the SX-surface library produced specific binders against all five target proteins. The distribution of target-binding clones from each S:X-surface library is shown in FIG. 34 as well as the distribution of properly folded and displayed S:X-surface antibodies that bound to Protein A.

[0751] Of the 181 clones identified that specifically bound to human VEGF, 148 of them had unique CDR sequences (see FIGS. 28A-C). Some of the unique sequences had randomized positions limited to binary Tyr/Ser (clone nos. F1-31). Clones F32-148 were additionally sequenced. Clones F1-31 were highly specific for VEGF and did not display cross-reactivity to five other control proteins, HER2, human DR5, human insulin, neutravidin, human IGF-1 or HGH (see FIG. 28D).

[0752] Of the 81 clones identified that specifically bound to HER2, 27 of them had unique CDR sequences (see FIG. 29A). The unique sequences fell into two categories: (a) CDR sequences with randomized positions limited to binary Tyr/Ser (clone nos. G49-61); (b) CDR sequences with randomized positions limited to binary Trp/Ser (clone nos. G29-48). The Tyr/Ser clones were highly specific for HER2 and did not display cross-reactivity to five other control proteins, human VEGF, human DR5, human insulin, neutravidin, human IGF-1 or HGH (see FIG. 29B). However, some of the Trp/Ser clones were cross-reactive (see FIG. 29B). The inhibitory concentration for each clone is shown in FIG. 29B.

[0753] Of the 29 clones identified that specifically bound to human insulin, 23 had unique CDR sequences (see FIG. 30A). The unique sequences fell into three categories: (a) CDR sequences with randomized positions limited to binary Tyr/Ser (clone no. H55); (b) CDR sequences with randomized positions limited to binary Trp/Ser (clone nos. H43-46); (c) CDR sequences with randomized positions limited to binary Arg/Ser (clone nos. H47-52). Clones H56-65 were additionally sequenced. Clones H43-H55 bound with high affinity to human insulin but also displayed cross-reactivity to five other control proteins, human VEGF, HER2, human DR5, neutravidin, human IGF-1 or HGH (see FIG. 30B).

[0754] Of the 237 clones identified that specifically bound to human IGF-1, 95 of them had unique CDR sequences (see FIGS. 31A-B). Some of the unique sequences fell into three categories: (a) CDR sequences with randomized positions limited to binary Tyr/Ser (clone nos. I75-96); (b) CDR sequences with randomized positions limited to binary Trp/Ser (clone nos. I69-74); (c) CDR sequences with randomized positions limited to binary Phe/Ser (clone no. I67). Clones I97-161 were additionally sequenced. Clones I167 to I96 bound with high affinity to human IGF-1 but some Trp/Ser and Tyr/Ser clones did display cross-reactivity to five other control proteins, human VEGF, HER2, human DR5, human insulin, neutravidin or HGH (see FIG. 31C).

[0755] Of the 16 clones identified that specifically bound to HGH, 11 of them had unique CDR sequences (see FIG. 32A). The unique CDR sequences were all Trp/Ser containing and were highly cross-reactive (see FIG. 32B).

[0756] A phage ELISA was used to test the ability of all clones to cross-react with a panel of six antigens other than the target antigen. Phage were produced in a 96-well format as described above and phage supernatants were diluted 3-fold in PBT buffer. The diluted phage supernatant was transferred to plates coated with human VEGF, HER2, human DR5, human insulin, neutravidin, human IGF-1, HGH, or BSA and incubated for one hour with gentle shaking at room temperature. The plates were washed with PBS including 0.05% Tween 20 and were incubated for 30 minutes with horseradish peroxidase/anti-M13 antibody conjugate (diluted 1:5000 in PT buffer) (Pharmacia). The plates were washed, developed with tetramethylbenzidine (TMB) substrate (Kirkegaard and Perry Laboratories) and quenched with 1.0 M H₃PO₄. Absorbance was determined spectrophotometrically at 450 nm. Weak cross-reactivity was defined as a signal between 0.2-2.0 and strong cross-reactivity was defined as a signal above 2.0. The results for all SX-surface clones are shown in FIGS. 28, 29, 30, 31 and 32. As shown in FIG. 35, of the SX-surface clones isolated, the S:R and S:W clones displayed the greatest average non-specific binding (0.5-0.6 OD and approximately 4.0 OD, respectively, at 450 mn by ELISA assay), while the S:Y and S:F clones each displayed similar low levels of average non-specific binding (0-0.1 OD at 450 mn by ELISA assay).

[0757] A single-point competitive ELISA was used to estimate the affinities of phage-displayed Fabs. Phage were produced in a 96-well format as described above, and phage supernatants were diluted fifteen-fold in PBT buffer or PBT buffer with 300 nM human VEGF, human insulin, human IGF-1, or HGH. The mixtures were incubated for 1 hour, and then transferred to plates coated with human VEGF, human insulin, human IGF-1, or HGH and incubated for 15 minutes. The plates were washed with PBS including 0.05% Tween 20 and were incubated for 30 minutes with horseradish peroxidase/anti-M13 antibody conjugate (diluted 1:5000 in PT buffer) (Pharmacia). The plates were washed, developed with tetramethylbenzidine (TMB) substrate (Kirkegaard and Perry Laboratories) and quenched with 1.0 M H₃PO₄. Absorbance was determined spectrophotometrically at 450 nm. The fraction of Fab-phage uncomplexed with solution-phase human VEGF, human insulin, human IGF-1 or HGH was calculated by dividing the A₄₅₀ in the presence of antigen by the A₄₅₀ in the absence of antigen. The results are shown in FIGS. 28D, 30B, 31C, and 32B.

[0758] A competitive phage ELISA was also used to estimate the binding affinities of HER2-binding phage-displayed Fabs. Phage were produced in a 96-well format as described above, and phage supernatants were serially diluted in PBT buffer, then incubated on plates coated with HER2 for 15 minutes. The plates were washed with PBS including 0.05% Tween 20 and were incubated for 30 minutes with horseradish peroxidase/anti-M13 antibody conjugate (diluted 1:5000 in PT buffer) (Pharmacia). The plates were washed, developed with tetramethylbenzidine (TMB) substrate (Kirkegaard and Perry Laboratories) and quenched with 1.0 M H₃PO₄. Absorbance was measured spectrophotometrically at 450 nm to determine the phage concentration giving ˜50% of the signal at saturation. A fixed, sub-saturating concentration of phage was diluted two fold in PBT buffer or PBT buffer containing two-fold serial dilutions of HER2 protein from 250 nM HER2 to 0.12 nM HER2. The mixtures were incubated for one hour with gentle shaking at room temperature, transferred to plates coated with HER2 and the plates were incubated for 15 minutes. The plates were washed and treated exactly as above. The binding affinities were estimated as IC₅₀ values (defined as the concentration of antigen that blocked 50% of the phage binding to the immobilized antigen). The results are shown in FIG. 29B.

[0759] Based on this analysis, the analysis of HER2-binding clones from the SXH3 library (Example 6), and the YSGR-A-D library (Example 4), soluble Fab proteins from three clones (clone nos. 42 (YSGR-A) and B11 (SXH3) and G54 (SX-surface)) were purified and subjected to surface plasmon resonance analysis of binding to human HER2. BIAcore® data was obtained according to Chen et al., J. Mol. Biol. (1999), 293(4): 865-81. Briefly, binding affinities of the purified Fabs for human HER2 were calculated from association and dissociation rate constants measured using a BIAcore®-A100 surface plasmon resonance system (BIACORE, Inc., Piscataway, N.J.). HER2 was covalently coupled to a biosensor chip at two different concentrations using N-ethyl-N′-(3-dimethylaminopropyl)-carbodiimide hydrochloride (EDC) and N-hydroxysuccinimide (NHS) according to the supplier's (BIAcore, Inc., Piscataway, N.J.) instructions. HER2 was buffer-exchanged into 10 mM sodium acetate, pH 5.0 and diluted to approximately 2.5 or 5.0 μg/ml. Aliquots of HER2 were injected at a flow rate of 5 μL/min to achieve approximately 50-170 response units (RU) of coupled protein. A solution of 1 M ethanolamine was injected as a blocking agent. For kinetics measurements, twofold serial dilutions of each Fab were injected in HBT at 25° C. at a flow rate of 10 μL/minute over each flow cell. The kₒₙ and k_{off} values were determined from the binding curves using the BIAevaluation software package (BIACORE, Inc., Piscataway, N.J.) using two-spot global fitting and combining the data from both flow cells. The equilibrium dissociation constant, K_{D}, was calculated as K_{off}/kₒₙ. The BIAcore® data is summarized in FIGS. 33A and B. Clone B11 had a kₐ of 1.9×10⁶ M⁻¹s⁻¹, a k_{d} of 1.7×10⁻³ s⁻¹, and a K_{D} of 890 pM. Rmax1 for the clone B11 experiments was 19 RU, and Rmax2 for the clone B11 experiments was 29 RU. Clone G54 had a kₐ of 2.0×10⁵ M⁻¹s⁻¹, a k_{d} of 2.2×10⁻³ s⁻¹, and a K_{D} of 11 nM. Rₘₐₓ₁ for the clone G54 experiments was 21 RU and Rₘₐₓ₂ for the clone G54 experiments was 34 RU. Clone YSGR-A-42 had a kₐ of 2.7×10⁶ M⁻¹s⁻¹, a k_{d} of 1.5×10⁻³ s⁻¹, and a K_{D} of 570 pM. Rmax1 for the clone 42 experiments was 25 RU, and Rmax2 for the clone 42 experiments was 38 RU. The tryptophan-containing clone (B11) had a faster kₒₙ and correspondingly smaller K_{D} than the tyrosine-containing clone (G54).

[0760] To study binding of anti-HER2 antibodies to HER2 expressed on mammalian cells, the binding of purified Fab protein of clones 42 (YSGR-A), B11 (SXH3), G54 (SX-surface), and G37 (SX-surface) to NR6 fibroblast cells over-expressing HER2 (NR6-HER2) was studied by flow cytometry. One million NR6-HER2 cells were incubated with 10 μg/ml Fab for 1 hour, followed by incubation with an Alexa488-conjugated murine anti-human IgG antibody for 1 hour. As a negative control, Fab binding to non-expressing NR6 cells was studied. As a positive control, 4D5 Fab was used. As demonstrated in FIG. 36, clones 42, B11, G54, and G37 bind specifically to Her2 on NR6 cells.

[0761] A competitive ELISA was used to test binding competition with Herceptin and Omnitarg and between several HER2-binding clones in IgG format (see FIG. 37 for the CDR sequences of the relevant clones). Biotinylated HER2 protein was serially diluted from 200 nM to 0.39 nM in PBT buffer, then incubated on plates coated with purified IgG proteins for 15 minutes. The plates were washed with PBS containing 0.05% Tween 20, and were incubated for 30 minutes with horseradish peroxidase/anti-M13 antibody conjugate (diluted 1:5000 in PT buffer) (Pharmacia). The plates were washed, developed with tetramethylbenzidine (TMB) substrate (Kirkegaard and Perry Laboratories) and quenched with 1.0 M H₃PO₄. Absorbance was measured spectrophotometrically at 450 nm to determine the biotinylated HER2 concentration giving around 50% of the signal at saturation. A fixed, sub-saturating concentration of biotinylated HER2 was diluted two-fold in PBT buffer or PBT buffer containing 100 nM purified IgG proteins. The mixtures were incubated for one hour with gentle shaking at room temperature, transferred to plates coated with IgG proteins, and the plates were incubated for 15 minutes. The plates were washed and treated as above. As shown in FIG. 38, none of the HER2-binding IgGs blocked binding of biotinylated HER2 to either Omnitarg or Herceptin. The IgGs did block binding between each other in two groups. One group made up of clones B11, G37, G54, and YSGR-A-42 compete for the same epitope and blocked binding to biotinylated HER2 that had been previously incubated with any of those clones. A second group made up of clones YSGR-A-27, B27, G43, and YSGR-D-104 compete for the same epitope on HER2 and blocked binding to biotinylated HER2. Group one clones are all higher-affinity binders than the group two clones.

[0762] All publications (including patents and patent applications) cited herein are hereby incorporated in their entirety by reference.

1. A polypeptide comprising an immunoglobulin heavy chain variable domain, wherein:
(i) CDRH1 comprises an amino acid sequence G-F-N-X1-X2-X3-X4-X5-X6-H (SEQ ID NO: 2629), wherein G is position 26 and X1 is position 29 according to the Kabat numbering system; wherein X1 is selected from F, L, I, and V; wherein X2 is selected from Y and S; wherein X3 is selected from Y and S; wherein X4 is selected from Y and S; wherein X5 is selected from Y and S, and wherein X6 is selected from M and I;
(ii) CDRH2 comprises an amino acid sequence: X1-I-X2-X3-X4-X5-X6-X7-T-X8-Y-A-D-S-V-K-G (SEQ ID NO: 2630), wherein X1 is position 50 according to the Kabat numbering system; wherein X1 is selected from Y and S; wherein X2 is selected from Y and S; wherein X3 is selected from P and S; wherein X4 is selected from Y and S; wherein X5 is selected from Y and S; wherein X6 is selected from G and S; wherein X7 is selected from Y and S; and wherein X8 is selected from Y and S; and
(iii) CDRH3 comprises an amino acid sequence: X1-X2-X3-X4-X5-X6-X7-X8-X9-X10-X11-X12-X13-X14-X15-X16-X17-X18-X19-D-Y (SEQ ID NO: 2631), wherein X1 is position 95 according to the Kabat numbering system, and wherein X1 is selected from Y and S; wherein X2 is selected from Y and S; wherein X3 is selected from Y and S, wherein X4 is selected from Y and S; wherein X5 is selected from Y and S; wherein X6 is selected from Y and S; wherein X7 is selected from Y and S or is not present; wherein X8 is selected from Y and S or is not present; wherein X9 is selected from Y and S or is not present; wherein X10 is selected from Y and S or is not present; wherein X11 is selected from Y and S or is not present; wherein X12 is selected from Y and S or is not present; wherein X13 is selected from Y and S or is not present; wherein X14 is selected from Y and S or is not present; wherein X15 is selected from Y and S or is not present; wherein X16 is selected from Y and S or is not present; wherein X17 is selected from Y and S or is not present; wherein X18 is selected from G and A; and wherein X19 is selected from F, L, I, and M.

2. The polypeptide of claim 1, wherein CDRH1 comprises an amino acid sequence selected from SEQ ID NOs: 52-66.

3. The polypeptide of claim 1, wherein CDRH2 comprises an amino acid sequence selected from SEQ ID NOs: 67-81.

4. The polypeptide of claim 1, wherein CDRH3 comprises an amino acid sequence selected from SEQ ID NOs: 82-96.

5. A polypeptide comprising an immunoglobulin heavy chain variable domain, wherein:
(i) CDRH1 comprises an amino acid sequence G-F-N-X1-X2-X3-X4-X5-X6-H (SEQ ID NO: 2629), wherein G is position 26 and X1 is position 29 according to the Kabat numbering system; wherein X1 is selected from F, L, I, and V; wherein X2 is selected from Y and S; wherein X3 is selected from Y and S; wherein X4 is selected from Y and S; wherein X5 is selected from Y and S, and wherein X6 is selected from M and I;
(ii) CDRH2 comprises an amino acid sequence: X1-I-X2-X3-X4-X5-X6-X7-T-X8-Y-A-D-S-V-K-G (SEQ ID NO: 2630), wherein X1 is position 50 according to the Kabat numbering system; wherein X1 is selected from Y and S; wherein X2 is selected from Y and S; wherein X3 is selected from P and S; wherein X4 is selected from Y and S; wherein X5 is selected from Y and S; wherein X6 is selected from G and S; wherein X7 is selected from Y and S; and wherein X8 is selected from Y and S; and
(iii) CDRH3 comprises an amino acid sequence: X1-X2-X3-X4-X5-X6-X7-X8-X9-X10-X11-X12-X13-X14-X15-X16-X17-X18-X19-D-Y (SEQ ID NO: 2632), where X1 is position 95 according to the Kabat numbering system, and wherein the amino acids at each of positions X1-X6 are selected from a pool of amino acids in a molar ratio of 20% Y, 15% S, 15% G, 3.125% A, 3.125% D, 3.125% E, 3.125% F, 3.125% H, 3.125% I, 3.125% K, 3.125% L, 3.125% M, 3.125% N, 3.125% P, 3.125% Q, 3.125% R, 3.125% T. 3.125% V, and 3.125% W; wherein the amino acids at each of positions X7-X17 are selected from a pool of amino acids in a molar ratio of 20% Y, 15% S. 15% G., 3.125% A, 3.125% D, 3.125% E, 3.125% F, 3.125% H, 3.125% I, 3.125% K, 3.125% L, 3.125% M, 3.125% N, 3.125% P, 3.125% Q, 3.125% R, 3.125% T, 3.125% V, and 3.125% W, or are not present; wherein X18 is selected from G and A; and wherein X19 is selected from F, L, I and M.

6. The polypeptide of claim 5, wherein CDRH1 comprises an amino acid sequence selected from SEQ ID NOs: 111-125.

7. The polypeptide of claim 5, wherein CDRH2 comprises an amino acid sequence selected from SEQ ID NOs: 126-141.

8. The polypeptide of claim 5, wherein CDRH3 comprises an amino acid sequence selected from SEQ ID NOs: 142 and 144-157.

9. A polypeptide comprising an immunoglobulin heavy chain variable domain, wherein:
(i) CDRH1 comprises an amino acid sequence G-F-N-X1-X2-X3-X4-X5-X6-H (SEQ ID NO: 2629), wherein G is position 26 and X1 is position 29 according to the Kabat numbering system; wherein X1 is selected from F, L, I, and V; wherein X2 is selected from Y and S; wherein X3 is selected from Y and S; wherein X4 is selected from Y and S; wherein X5 is selected from Y and S, and wherein X6 is selected from M and I;
(ii) CDRH2 comprises an amino acid sequence: X1-I-X2-X3-X4-X5-X6-X7-T-X8-Y-A-D-S-V-K-G (SEQ ID NO: 2630), wherein X1 is position 50 according to the Kabat numbering system; wherein X1 is selected from Y and S; wherein X2 is selected from Y and S; wherein X3 is selected from P and S; wherein X4 is selected from Y and S; wherein X5 is selected from Y and S; wherein X6 is selected from G and S; wherein X7 is selected from Y and S; and wherein X8 is selected from Y and S; and
(iii) CDRH3 comprises an amino acid sequence: X1-X2-X3-X4-X5-X6-X7-D-Y (SEQ ID NO: 2633), wherein X1 is position 95 according to the Kabat numbering system, and wherein the amino acids at each of positions X1-X5 are selected from a pool of amino acids in amolarratio of 20% Y, 15% S, 15% G, 3.125% A, 3.125% D, 3.125% E, 3.125% F, 3.125% H, 3.125% I, 3.125% K, 3.125% L, 3.125% M, 3.125% N, 3.125% P, 3.125% Q, 3.125% R, 3.125% T, 3.125% V, and 3.125% W; wherein X6 is selected from G and A; and wherein X7 is selected from F, L, I and M.

10. The polypeptide of claim 9 wherein CDRH3 comprises the amino acid sequence of SEQ ID NO: 143.

11. A polypeptide comprising an immunoglobulin heavy chain variable domain, wherein:
(i) CDRH1 comprises an amino acid sequence G-F-X1-I-X2-X3-X4-X5-I-H (SEQ ID NO: 2634), wherein G is position 26 and X1 is position 28 according to the Kabat numbering system; wherein X1 is selected from Y and S; wherein X2 is selected from Y and S; wherein X3 is selected from Y and S; wherein X4 is selected from Y and S; and wherein X5 is selected from Y and S;
(ii) CDRH2 comprises an amino acid sequence: X1-I-X2-P-X3-X4-G-X5-T-X6-Y-A-D-S-V-K-G (SEQ ID NO: 2635), wherein X1 is position 50 according to the Kabat numbering system; wherein X1 is selected from Y and S; wherein X2 is selected from Y and S; wherein X3 is selected from Y and S; wherein X4 is selected from Y and S; wherein X5 is selected from Y and S; and wherein X6 is selected from Y and S; and
(iii) CDRH3 comprises an amino acid sequence: X1-X2-X3-X4-X5-X6-X7-X8-X9-X10-X11-X12-X13-X14-X15-X16-X17-X18-X19-D-Y (SEQ ID NO: 2636), wherein X1 is position 95 according to the Kabat numbering system, and wherein the amino acids at each of positions X1-X6 are selected from a pool of amino acids in a molar ratio of 50% Y, 25% S, and 25% G; wherein the amino acids at each of positions X7-X17 are selected from a pool of amino acids in a molar ratio of 50% Y, 25% S, and 25% G, or are not present; wherein X18 is selected from G and A; and wherein X29 is selected from I, M, L, and F.

12. A polypeptide comprising an immunoglobulin heavy chain variable domain, wherein:
(i) CDRH1 comprises an amino acid sequence G-F-X1-I-X2-X3-X4-X5-I-H (SEQ ID NO: 2634), wherein G is position 26 and X1 is position 28 according to the Kabat numbering system; wherein X1 is selected from Y and S; wherein X2 is selected from Y and S; wherein X3 is selected from Y and S; wherein X4 is selected from Y and S; and wherein X5 is selected from Y and S;
(ii) CDRH2 comprises an amino acid sequence: X1-I-X2-P-X3-X4-G-X5-T-X6-Y-A-D-S-V-K-G (SEQ ID NO: 2635), wherein X1 is position 50 according to the Kabat numbering system; wherein X1 is selected from Y and S; wherein X2 is selected from Y and S; wherein X3 is selected from Y and S; wherein X4 is selected from Y and S; wherein X5 is selected from Y and S; and wherein X6 is selected from Y and S; and
(iii) CDRH3 comprises an amino acid sequence: X1-X2-X3-X4-X5-X6-X7-X8-X9-X10-X11-X12-X13-X14-X15-X16-X17-X18-X19-D-Y (SEQ ID NO: 2637), wherein X1 is position 95 according to the Kabat numbering system, and wherein the amino acids at each of positions X1-X6 are selected from a pool of amino acids in a molar ratio of 25% Y, 50% S, and 25% R; wherein the amino acids at each of positions X7-X17 are selected from a pool of amino acids in a molar ratio of 25% Y, 50% S, and 25% R, or are not present; wherein X18 is selected from G and A; and wherein X19 is selected from I, M, L, and F.

13. A polypeptide comprising an immunoglobulin heavy chain variable domain, wherein:
(i) CDRH1 comprises an amino acid sequence G-F-X1-I-X2-X3-X4-X5-I-H (SEQ ID NO: 2634), wherein G is position 26 and X1 is position 28 according to the Kabat numbering system; wherein X1 is selected from Y and S; wherein X2 is selected from Y and S; wherein X3 is selected from Y and S; wherein X4 is selected from Y and S; and wherein X5 is selected from Y and S;
(ii) CDRH2 comprises an amino acid sequence: X1-I-X2-P-X3-X4-G-X5-T-X6-Y-A-D-S-V-K-G (SEQ ID NO: 2635), wherein X1 is position 50 according to the Kabat numbering system; wherein X1 is selected from Y and S; wherein X2 is selected from Y and S; wherein X3 is selected from Y and S; wherein X4 is selected from Y and S; wherein X5 is selected from Y and S; and wherein X6 is selected from Y and S; and
(iii) CDRH3 comprises an amino acid sequence: X1-X2-X3-X4-X5-X6-X7-X8-X9-X10-X11-X12-X13-X14-X15-X16-X17-X18-X19-D-Y (SEQ ID NO: 2638), wherein X1 is position 95 according to the Kabat numbering system, and wherein the amino acids at each of positions X1-X6 are selected from a pool of amino acids in a molar ratio of 38% Y, 25% S, 25% G, and 12% R; wherein the amino acids at each of positions X7-X17 are selected from a pool of amino acids in a molar ratio of 38% Y, 25% S, 25% G, and 12% R, or are not present; wherein X18 is selected from G and A; and wherein X19 is selected from I, M, L, and F.

14. A polypeptide comprising an immunoglobulin heavy chain variable domain, wherein:
(i) CDRH1 comprises an amino acid sequence G-F-X1-I-X2-X3-X4-X5-I-H (SEQ ID NO: 2634), wherein G is position 26 and X1 is position 28 according to the Kabat numbering system; wherein X1 is selected from Y and S; wherein X2 is selected from Y and S; wherein X3 is selected from Y and S; wherein X4 is selected from Y and S; and wherein X5 is selected from Y and S;
(ii) CDRH2 comprises an amino acid sequence: X1-I-X2-P-X3-X4-G-X5-T-X6-Y-A-D-S-V-K-G (SEQ ID NO: 2635), wherein X1 is position 50 according to the Kabat numbering system; wherein X1 is selected from Y and S; wherein X2 is selected from Y and S; wherein X3 is selected from Y and S; wherein X4 is selected from Y and S; wherein X5 is selected from Y and S; and wherein X6 is selected from Y and S; and
(iii) CDRH3 comprises an amino acid sequence: X1-X2-X3-X4-X5-X6-X7-X8-X9-X10-X11-X12-X13-X14-X15-X16-X17-X18-X19-D-Y (SEQ ID NO: 2639), wherein X1 is position 95 according to the Kabat numbering system, and wherein the amino acids at each of positions X1-X6 are selected from a pool of amino acids in a molar ratio of 20% Y, 26% S, 26% G, 13% R, 1% A, 1% D, 1% E, 1% F, 1% H, 1% I, 1% K, 1% L, 1% M, 1% N, 1% P, 1% Q, 1% T, 1% V, and 1% W; wherein the amino acids at each of positions X7-X17 are selected from a pool of amino acids in a molar ratio of 20% Y, 26% S, 26% G, 13% R, 1% A, 1% D, 1% E, 1% F, 1% H, 1% I, 1% K, 1% L, 1% M, 1% N, 1% P, 1% Q, 1% T, 1% V, and 1% W, or are not present; wherein X18 is selected from G and A; and wherein X19 is selected from I, M, L, and F.

15. The polypeptide of claim 14, wherein CDRH1 comprises an amino acid sequence selected from SEQ ID NOs: 318-439.

16. The polypeptide of claim 14, wherein CDRH2 comprises an amino acid sequence selected from SEQ ID NOs: 440-561.

17. The polypeptide of claim 14, wherein CDRH3 comprises an amino acid sequence selected from SEQ ID NOs: 562-683.

18. A polypeptide comprising an immunoglobulin heavy chain variable domain, wherein:
(i) CDRH1 comprises an amino acid sequence G-F-X1-I-X2-X3-X4-X5-I-H (SEQ ID NO: 2634), wherein G is position 26 and X1 is position 28 according to the Kabat numbering system; wherein X1 is selected from Y and S; wherein X2 is selected from Y and S; wherein X3 is selected from Y and S; wherein X4 is selected from Y and S; and wherein X5 is selected from Y and S;
(ii) CDRH2 comprises an amino acid sequence: X1-I-X2-P-X3-X4-S-X5-T-X6-Y-A-D-S-V-K-G (SEQ ID NO: 2635), wherein X1 is position 50 according to the Kabat numbering system; wherein X1 is selected from Y and S; wherein X2 is selected from Y and S; wherein X3 is selected from Y and S; wherein X4 is selected from Y and S; wherein X5 is selected from Y and S; and wherein X6 is selected from Y and S; and
(iii) CDRH3 comprises an amino acid sequence: X1-X2-X3-X4-X5-X6-X7-X8-X9-X10-X11-X12-X13-X14-X15-X16-X17-X18-X19 (SEQ ID NO: 2640), wherein X1 is position 95 according to the Kabat numbering system, and wherein the amino acids at each of positions X1-X19 are selected from S and one of A, C, F, G, I, L, N, P, R, T, W, or Y, or are not present; wherein X18 is selected from G and A; and wherein X19 is selected from F, L, I, and M.

19. The polypeptide of claim 18, wherein CDRHI comprises an amino acid sequence selected from SEQ ID NOs: 1340-1396, 1538-1564, 1653-1686, 1805-1854, and 1963-1970.

20. The polypeptide of claim 18, wherein CDRH2 comprises an amino acid sequence selected from SEQ ID NOs: 1397-1453, 1565-1591, 1687-1720, 1855-1904, and 1971-1978.

21. The polypeptide of claim 18, wherein CDRH3 comprises an amino acid sequence selected from SEQ ID NOs: 1454-1510, 1592-1618, 1721-1754, 1905-1954, and 1979-1986.

22. A polypeptide comprising an immunoglobulin heavy chain variable domain, wherein:
(i) CDRH1 comprises an amino acid sequence G-F-X1-I-X2-X3-X4-X5-I-H (SEQ ID NO: 2641), wherein G is position 26 and X1 is position 28 according to the Kabat numbering system; wherein the amino acid at each of positions X1-X5 is selected from S and one of Y, W, R, or F;
(ii) CDRH2 comprises an amino acid sequence: X1-I-X2-P-X3-X4-S-X5-T-X6-Y-A-D-S-V-K-G (SEQ ID NO: 2642), wherein X1 is position 50 according to the Kabat numbering system; wherein the amino acid at each of positions X1-X6 is selected from S and one of Y, W, R, or F; and
(iii) CDRH3 comprises an amino acid sequence: X1-X2-X3-X4-X5-X6-X7-X8-X9-X10-X11-X12-X13-X14-X15-X16-X17-X18-X19 (SEQ ID NO: 2643), wherein X1 is position 95 according to the Kabat numbering system, and wherein the amino acids at each of positions X1-X19 are selected from S and one of Y, W, R, or F, or are not present; wherein X18 is selected from G and A; and wherein X19 is selected from F, L, I, and M.

23. The polypeptide of claim 22, wherein CDRH1 comprises an amino acid sequence selected from SEQ ID NOs: 2027-2057, 2147-2173, 2239-2249, 2300-2327, and 2395-2405.

24. The polypeptide of claim 22, wherein CDRH2 comprises an amino acid sequence selected from SEQ ID NOs: 2058-2088, 2174-2200, 2250-2260, 2328-2355, and 2406-2416.

25. The polypeptide of claim 22, wherein CDRH3 comprises an amino acid sequence selected from SEQ ID NOs: 2089-2119, 2201-2227, 2261-2271, 2356-2383, and 2417-2427.

26. A polypeptide comprising an immunoglobulin heavy chain variable domain, wherein:
(i) CDRH1 comprises an amino acid sequence G-F-N-X1-X2-X3-X4-X5-X6-H (SEQ ID NO: 2644), wherein G is position 26 and X1 is position 29 according to the Kabat numbering system; and wherein X1-X6 are naturally occurring amino acids other than cysteine;
(ii) CDRH2 comprises an amino acid sequence: X6-I-X7-X8-X9-X10-X11-X12-T-X13-Y-A-D-S-V-K-G (SEQ ID NO: 2645), wherein X6 is position 50 according to the Kabat numbering system, and wherein X6-X13 are naturally occurring amino acids other than cysteine; and
(iii) CDRH3 comprises an amino acid sequence: X14-X15-X16-X17-X18-(X19)ₙ-X20-X21-D-Y (SEQ ID NO: 2646), wherein X14 is position 95 according to the Kabat numbering system, and wherein n is a suitable number that would retain the functional activity of the heavy chain variable domain, and wherein X14-X21 are naturally occurring amino acids other than cysteine.

27. The polypeptide of claim 26, wherein n is 1 to 12.

28. The polypeptide of claim 26, wherein X1 is selected from F, L, I, and V; wherein X2 is selected from Y and S; wherein X3 is selected from Y and S; wherein X4 is selected from Y and S; wherein X5 is selected from Y and S, and wherein X6 is selected from M and I.

29. The polypeptide of claim 26, wherein X6 is selected from Y and S; wherein X7 is selected from Y and S; wherein X8 is selected from P and S; wherein X9 is selected from Y and S; wherein X10 is selected from Y and S; wherein X11 is selected from G and S; wherein X12 is selected from Y and S; and wherein X13 is selected from Y and S.

30. The polypeptide of claim 26, wherein X14 is selected from Y and S; wherein X15 is selected from Y and S; wherein X16 is selected from Y and S, wherein X17 is selected from Y and S; wherein X18 is selected from Y and S; wherein X19 is selected from Y and S; wherein X20 is selected from G and A; and wherein X21 is selected from F, L, I, and M.

31. The polypeptide of claim 26, wherein the amino acids at each of positions X14-X19 are selected from a pool of amino acids in a molar ratio of 20% Y, 15% S, 15% G, 3.125% A, 3.125% D, 3.125% E, 3.125% F, 3.125% H, 3.125% I, 3.125% K, 3.125% L, 3.125% M, 3.125% N, 3.125% P, 3.125% Q, 3.125% R, 3.125% T, 3.125% V, and 3.125% W, wherein X20 is selected from G and A; and wherein X21 is selected from F, L, I, and M.

32. The polypeptide of claim 26, wherein CDRHI comprises an amino acid sequence selected from SEQ ID NOs: 52-66 and 111-125.

33. The polypeptide of claim 26, wherein CDRH2 comprises an amino acid sequence selected from SEQ ID NOs: 67-81 and 126-141.

34. The polypeptide of claim 26, wherein CDRH3 comprises an amino acid sequence selected from SEQ ID NOs: 82-96 and 142-157.

35-67. (canceled)

68. A polypeptide comprising an immunoglobulin light chain variable domain, wherein CDRL3 comprises an amino acid sequence: Q-Q-X1-X2-X3-X4-P-X5-T (SEQ ID NO: 2654), wherein X1 is position 91 according to the Kabat numbering system, and wherein the amino acids at each of positions X1-X5 are selected from S and one of Y, W, R, or F.

69. The polypeptide of claim 68, wherein CDRL3 comprises an amino acid sequence selected from SEQ ID NOs: 1996-2026, 2120-2146, 2228-2238, 2272-2299, and 2384-2394.

70. A polypeptide comprising an immunoglobulin light chain variable domain, wherein:
(i) CDRL1 comprises a first consensus hypervariable sequence or variant thereof comprising substitution at one or more positions compared to a corresponding consensus hypervariable sequence;
(ii) CDRL2 comprises a second consensus hypervariable sequence or variant thereof comprising substitution at one or more positions compared to a corresponding consensus hypervariable sequence; and
(iii) CDRL3 comprises an amino acid sequence: Q-Q-X1-X2-X3-(X4)ₙ-X5-X6-T (SEQ ID NO: 2655), wherein X1-X6 are any naturally occurring amino acids other than cysteine, and wherein X1 is position 91 according to the Kabat numbering system.

71. The polypeptide of claim 70, wherein X1 is position 91 according to the Kabat numbering system, wherein X1 is selected from Y and S; wherein X2 is selected from Y and S; wherein X3 is selected from Y and S; wherein X4 is selected from Y and S; wherein X5 is selected from P and L; and wherein X6 is selected from F, L, I, and V.

72. The polypeptide of claim 70, wherein n is 1 to 3.

73. The polypeptide of claim 72, wherein CDRL3 comprises an amino acid sequence selected from SEQ ID NOs: 37-51 and 97-110.

74. The polypeptide of claim 70, wherein the first consensus hypervariable sequence is R-A-S-Q-D-V-N-T-A-V-A (SEQ ID NO: 6).

75. The polypeptide of claim 70, wherein the second consensus hypervariable sequence is S-A-S-S-L-Y-S (SEQ ID NO: 7).

76-81. (canceled)

82. The antibody of claim 1 further comprising a polypeptide comprising an immunoglobulin light chain variable domain according to claim 68.

83. The polypeptide of claim 5 comprising
a light chain antibody variable domain comprising the polypeptide of claim 68.

84. A polypeptide according to claim 1, further comprising a dimerization domain linked to the C-terminal region of a heavy chain antibody variable domain.

85. A polypeptide according to claim 84, wherein the dimerization domain comprises a leucine zipper domain or a sequence comprising at least one cysteine residue.

86. A polypeptide according to claim 85, wherein the dimerization domain comprises a hinge region from an antibody and a leucine zipper.

87. A polypeptide according to claim 84, wherein the dimerization domain is a single cysteine.

88. A fusion polypeptide comprising a polypeptide according to claim 1, wherein an antibody variable domain comprising the polypeptide is fused to at least a portion of a viral coat protein.

89. The fusion polypeptide of claim 88, wherein the viral coat protein is selected from the group consisting of protein pIII, major coat protein pVIII, Soc, Hoc, gpD, pv1, and variants thereof.

90. The fusion polypeptide of claim 88, further comprising a dimerization domain between the variable domain and the viral coat protein.

91. (canceled)

92. The fusion polypeptide of claim 88, further comprising a variable domain fused to a peptide tag.

93. (canceled)

94. The fusion polypeptide of claim 92, wherein the peptide tag is selected from the group consisting of gD, c-myc, poly-his, a fluorescence protein, and B-galactosidase.

95. A polypeptide of claim 1, further comprising framework regions FR1, FR2, FR3, and/or FR4 for an antibody variable domain corresponding to the variant CDRH1, CDRH2, CDRH3, and/or CDRL3, wherein the framework regions are obtained from a single antibody template.

96. The polypeptide of claim 95, wherein each of the framework regions comprises an amino acid sequence corresponding to the framework region amino acid sequences of antibody 4D5 (SEQ ID NOs: 1099-1102 and 1103-1106) or a variant of antibody 4D5 (SEQ ID NOs: 1107-1110 and 1111-1114).

97. A library comprising a plurality of the polypeptide of claim 1, and wherein the library has at least 1×10⁴ distinct antibody variable domain sequences.

98. A method of generating a composition comprising a plurality of polypeptides comprising:
(a) generating a plurality of polypeptides comprising:
(i) CDRH1 comprising an amino acid sequence G-F-N-X1-X2-X3-X4-X5-X6-H (SEQ ID NO: 2629), wherein G is position 26 and X1 is position 29 according to the Kabat numbering system; wherein X1 is selected from F, L, I, and V; wherein X2 is selected from Y and S; wherein X3 is selected from Y and S; wherein X4 is selected from Y and S; wherein X5 is selected from Y and S, and wherein X6 is selected from M and I;
(ii) CDRH2 comprising an amino acid sequence: X1-I-X2-X3-X4-X5-X6-X7-T-X8-Y-A-D-S-V-K-G (SEQ ID NO: 2630), wherein X1 is position 50 according to the Kabat numbering system; wherein X1 is selected from Y and S; wherein X2 is selected from Y and S; wherein X3 is selected from P and S; wherein X4 is selected from Y and S; wherein X5 is selected from Y and S; wherein X6 is selected from G and S; wherein X7 is selected from Y and S; and wherein X8 is selected from Y and S; and
(iii) CDRH3 comprising an amino acid sequence: X1-X2-X3-X4-X5-X6-X7-X8-X9-X10-X11-X12-X13-X14-X15-X16-X17-X18-X19-D-Y (SEQ ID NO: 2631), wherein X1 is position 95 according to the Kabat numbering system, and wherein X1 is selected from Y and S; wherein X2 is selected from Y and S; wherein X3 is selected from Y and S, wherein X4 is selected from Y and S; wherein X5 is selected from Y and S; wherein X6 is selected from Y and S; wherein X7 is selected from Y and S or is not present; wherein X8 is selected from Y and S or is not present; wherein X9 is selected from Y and S or is not present; wherein X10 is selected from Y and S or is not present; wherein X11 is selected from Y and S or is not present; wherein X12 is selected from Y and S or is not present; wherein X13 is selected from Y and S or is not present; wherein X14 is selected from Y and S or is not present; wherein X15 is selected from Y and S or is not present; wherein X16 is selected from Y and S or is not present; wherein X17 is selected from Y and S or is not present; wherein X18 is selected from G and A; and wherein X19 is selected from F, L, I, and M.

99. A method of generating a composition comprising a plurality of polypeptides comprising:
(a) generating a plurality of polypeptides comprising:
(i) CDRH1 comprising an amino acid sequence G-F-N-X1-X2-X3-X4-X5-X6-H (SEQ ID NO: 2629), wherein G is position 26 and X1 is position 29 according to the Kabat numbering system; wherein X1 is selected from F, L, I, and V; wherein X2 is selected from Y and S; wherein X3 is selected from Y and S; wherein X4 is selected from Y and S; wherein X5 is selected from Y and S, and wherein X6 is selected from M and I;
(ii) CDRH2 comprising an amino acid sequence: X1-I-X2-X3-X4-X5-X6-X7-T-X8-Y-A-D-S-V-K-G (SEQ ID NO: 2630), wherein X1 is position 50 according to the Kabat numbering system; wherein X1 is selected from Y and S; wherein X2 is selected from Y and S; wherein X3 is selected from P and S; wherein X4 is selected from Y and S; wherein X5 is selected from Y and S; wherein X6 is selected from G and S; wherein X7 is selected from Y and S; and wherein X8 is selected from Y and S; and
(iii) CDRH3 comprising an amino acid sequence: X1-X2-X3-X4-X5-X6-X7-X8-X9-X10-X11-X12-X13-X14-X15-X16-X17-X18-X19-D-Y (SEQ ID NO: 2632), wherein X1 is position 95 according to the Kabat numbering system, and wherein the amino acids at each of positions X1-X6 are selected from a pool of amino acids in a molar ratio of 20% Y, 15% S, 15% G, 3.125% A, 3.125% D, 3.125% E, 3.125% F, 3.125% H, 3.125% I, 3.125% K, 3.125% L, 3.125% M, 3.125% N, 3.125% P, 3.125% Q, 3.125% R, 3.125% T, 3.125% V, and 3.125% W; wherein the amino acids at each of positions X7-X17 are selected from a pool of amino acids in a molar ratio of 20% Y, 15% S, 15% G, 3.125% A, 3.125% D, 3.125% E, 3.125% F, 3.125% H, 3.125% I, 3.125% K, 3.125% L, 3.125% M, 3.125% N, 3.125% P, 3.125% Q, 3.125% R, 3.125% T, 3.125% V, and 3.125% W, or are not present; wherein X18 is selected from G and A; and wherein X19 is selected from I, M, L, and F.

100. A method of generating a composition comprising a plurality of polypeptides comprising:
(a) generating a plurality of polypeptides comprising:
(i) CDRH1 comprising an amino acid sequence G-F-X1-I-X2-X3-X4-X5-I-H (SEQ ID NO: 2634), wherein G is position 26 and X1 is position 28 according to the Kabat numbering system; wherein X1 is selected from Y and S; wherein X2 is selected from Y and S; wherein X3 is selected from Y and S; wherein X4 is selected from Y and S; and wherein X5 is selected from Y and S;
(ii) CDRH2 comprising an amino acid sequence: X1-I-X2-P-X3-X4-S-X5-T-X6-Y-A-D-S-V-K-G (SEQ ID NO: 2657), wherein X1 is position 50 according to the Kabat numbering system; wherein X1 is selected from Y and S; wherein X2 is selected from Y and S; wherein X3 is selected from Y and S; wherein X4 is selected from Y and S; wherein X5 is selected from Y and S; and wherein X6 is selected from Y and S; and
(iii) CDRH3 comprising an amino acid sequence: X1-X2-X3-X4-X5-X6-X7-X8-X9-X10-X11-X12-X13-X14-X15-X16-X17-X18-X19 (SEQ ID NO: 2640), wherein X1 is position 95 according to the Kabat numbering system, and wherein the amino acids at each of positions X1-X19 are selected from S and one of A, C, F, G, I, L, N, P, R, T, W, or Y, or are not present; wherein X18 is selected from G and A; and wherein X19 is selected from F, L, I, and M.

101. A method of generating a composition comprising a plurality of polypeptides comprising:
(a) generating a plurality of polypeptides comprising:
(i) CDRH1 comprises an amino acid sequence G-F-X1-I-X2-X3-X4-X5-I-H (SEQ ID NO: 2641), wherein G is position 26 and X1 is position 28 according to the Kabat numbering system; wherein the amino acid at each of positions X1-X5 is selected from S and one of Y, W, R, or F;
(ii) CDRH2 comprises an amino acid sequence: X1-I-X2-P-X3-X4-S-X5-T-X6-Y-A-D-S-V-K-G (SEQ ID NO: 2642), wherein X1 is position 50 according to the Kabat numbering system; wherein the amino acid at each of positions X1-X6 is selected from S and one of Y, W, R, or F; and
(iii) CDRH3 comprises an amino acid sequence: X1-X2-X3-X4-X5-X6-X7-X8-X9-X10-X11-X12-X13-X14-X15-X16-X17-X18-X19 (SEQ ID NO: 2643), wherein X1 is position 95 according to the Kabat numbering system, and wherein the amino acids at each of positions X1-X19 are selected from S and one of Y, W, R, or F, or are not present; wherein X18 is selected from G and A; and wherein X19 is selected from F, L, I, and M.

102. The method of claim 98, wherein the method further comprises:
(b) generating a plurality of polypeptides comprising:
(i) CDRL1 comprising a first consensus hypervariable sequence or variant thereof comprising substitution at one or more positions compared to a corresponding consensus hypervariable sequence;
(ii) CDRL2 comprising a second consensus hypervariable sequence or variant thereof comprising substitution at one or more positions compared to a corresponding consensus hypervariable sequence; and
(iii) CDRL3 comprising an amino acid sequence: Q-Q-X1-X2-X3-X4-X5-X6-X7-X8-T (SEQ ID NO: 2652), wherein X1 is position 91 according to the Kabat numbering system; an wherein X1 is position 91 according to the Kabat numbering system, wherein X1 is selected from Y and S; wherein X2 is selected from Y and S; wherein X3 is selected from Y and S; wherein X4 is selected from Y and S; wherein X5 is selected from Y and S, or is not present; wherein X6 is selected from Y and S, or is not present; wherein X7 is selected from P and L; and wherein X8 is selected from F, L, I, and V.

103. The method of claim 100, wherein the method further comprises:
(b) generating a plurality of polypeptides comprising:
(i) CDRL1 comprising a first consensus hypervariable sequence or variant thereof comprising substitution at one or more positions compared to a corresponding consensus hypervariable sequence;
(ii) CDRL2 comprising a second consensus hypeiwariable sequence or variant thereof comprising substitution at one or more positions compared to a corresponding consensus hypervariable sequence; and
(iii) CDRL3 comprising an amino acid sequence: Q-Q-X1-X2-X3-X4-P-X5-T (SEQ ID NO: 2653), wherein X1 is position 91 according to the Kabat numbering system; wherein X1 is selected from Y and S; wherein X2 is selected from Y and S; wherein X3 is selected from Y and S; wherein X4 is selected from Y and S; and wherein X5 is selected from Y and S.

104. The method of claim 101, wherein the method further comprises:
(b) generating a plurality of polypeptides comprising:
(i) CDRL1 comprising a first consensus hypervariable sequence or variant thereof comprising substitution at one or more positions compared to a corresponding consensus hypervariable sequence;
(ii) CDRL2 comprising a second consensus hypervariable sequence or variant thereof comprising substitution at one or more positions compared to a corresponding consensus hypervariable sequence; and
(iii) CDRL3 comprising an amino acid sequence: Q-Q-X1-X2-X3-X4-P-X5-T (SEQ ID NO: 2654), wherein X1 is position 91 according to the Kabat numbering system; and wherein the amino acids at each of positions X1-X5 are selected from S and one of Y, W, R, and F.

105. A method of generating a composition comprising a plurality of polypeptides of claim 1 comprising:
(a) generating a plurality of polypeptides comprising:
(i) CDRH1 comprises an amino acid sequence G-F-X1-I-X2-X3-X4-X5-I-H (SEQ ID NO: 2634), wherein G is position 26 and X1 is position 28 according to the Kabat numbering system; wherein X1 is selected from Y and S; wherein X2 is selected from Y and S; wherein X3 is selected from Y and S; wherein X4 is selected from Y and S; and wherein X5 is selected from Y and S;
(ii) CDRH2 comprises an amino acid sequence: X1-I-X2-P-X3-X4-G-X5-T-X6-Y-A-D-S-V-K-G (SEQ ID NO: 2635), wherein X1 is position 50 according to the Kabat numbering system; wherein X1 is selected from Y and S; wherein X2 is selected from Y and S; wherein X3 is selected from Y and S; wherein X4 is selected from Y and S; wherein X5 is selected from Y and S; and wherein X6 is selected from Y and S; and
(iii) CDRH3 comprises an amino acid sequence: X1-X2-X3-X4-X5-X6-X7-X8-X9-X10-X11-X12-X13-X14-X15-X16-X17-X18-X19-D-Y (SEQ ID NO: 2636), wherein X1 is position 95 according to the Kabat numbering system, and wherein the amino acids at each of positions X1-X6 are selected from a pool of amino acids in a molar ratio of 50% Y, 25% S, and 25% G; wherein the amino acids at each of positions X7-X17 are selected from a pool of amino acids in a molar ratio of 50% Y, 25% S, and 25% G, or are not present; wherein X18 is selected from G and A; and wherein X19 is selected from I, M, L, and F.

106. A method of generating a composition comprising a plurality of polypeptides of claim 12 comprising:
(a) generating a plurality of polypeptides comprising:
(i) CDRH1 comprising an amino acid sequence G-F-X1-I-X2-X3-X4-X5-I-H (SEQ ID NO: 2634), wherein G is position 26 and X1 is position 28 according to the Kabat numbering system; wherein X1 is selected from Y and S; wherein X2 is selected from Y and S; wherein X3 is selected from Y and S; wherein X4 is selected from Y and S; and wherein X5 is selected from Y and S;
(ii) CDRH2 comprising an amino acid sequence: X1-I-X2-P-X3-X4-G-X5-T-X6-Y-A-D-S-V-K-G (SEQ ID NO: 2635), wherein X1 is position 50 according to the Kabat numbering system; wherein X1 is selected from Y and S; wherein X2 is selected from Y and S; wherein X3 is selected from Y and S; wherein X4 is selected from Y and S; wherein X5 is selected from Y and S; and wherein X6 is selected from Y and S; and
(iii) CDRH3 comprising an amino acid sequence: X1-X2-X3-X4-X5-X6-X7-X8-X9-X10-X11-X12-X13-X14-X15-X16-X17-X18-X19-D-Y (SEQ ID NO: 2637), wherein X1 is position 95 according to the Kabat numbering system, and wherein the amino acids at each of positions X1-X6 are selected from a pool of amino acids in a molar ratio of 25% Y, 50% S, and 25% R; wherein the amino acids at each of positions X7-X17 are selected from a pool of amino acids in a molar ratio of 25% Y, 50% S, and 25% R, or are not present; wherein X18 is selected from G and A; and wherein X19 is selected from I, M, L, and F.

107. A method of generating a composition comprising a plurality of polypeptides of claim 13 comprising:
(a) generating a plurality of polypeptides comprising:
(i) CDRH1 comprising an amino acid sequence G-F-X1-I-X2-X3-X4-X5-I-H (SEQ ID NO: 2934), wherein G is position 26 and X1 is position 28 according to the Kabat numbering system; wherein X1 is selected from Y and S; wherein X2 is selected from Y and S; wherein X3 is selected from Y and S; wherein X4 is selected from Y and S; and wherein X5 is selected from Y and S;
(ii) CDRH2 comprising an amino acid sequence: X1-I-X2-P-X3-X4-G-X5-T-X6-Y-A-D-S-V-K-G (SEQ ID NO: 2935), wherein X1 is position 50 according to the Kabat numbering system; wherein X1 is selected from Y and S; wherein X2 is selected from Y and S; wherein X3 is selected from Y and S; wherein X4 is selected from Y and S; wherein X5 is selected from Y and S; and wherein X6 is selected from Y and S; and
(iii) CDRH3 comprising an amino acid sequence: X1-X2-X3-X4-X5-X6-X7-X8-X9-X10-X11-X12-X13-X14-X15-X16-X17-X18-X19-D-Y (SEQ ID NO: 2938), wherein X1 is position 95 according to the Kabat numbering system, and wherein the amino acids at each of positions X1-X6 are selected from a pool of amino acids in a molar ratio of 38% Y, 25% S, 25% G, and 12% R; wherein the amino acids at each of positions X7-X17 are selected from a pool of amino acids in a molar ratio of 38% Y, 25% S, 25% G, and 12% R, or are not present; wherein X18 is selected from G and A; and wherein X19 is selected from I, M, L, and F.

108. A method of generating a composition comprising a plurality of polypeptides of claim 14 comprising:
(a) generating a plurality of polypeptides comprising:
(i) CDRH1 comprising an amino acid sequence G-F-X1-I-X2-X3-X4-X5-I-H (SEQ ID NO: 2934), wherein G is position 26 and X1 is position 28 according to the Kabat numbering system; wherein X1 is selected from Y and S; wherein X2 is selected from Y and S; wherein X3 is selected from Y and S; wherein X4 is selected from Y and S; and wherein X5 is selected from Y and S;
(ii) CDRH2 comprising an amino acid sequence: X1-I-X2-P-X3-X4-G-X5-T-X6-Y-A-D-S-V-K-G (SEQ ID NO: 2935), wherein X1 is position 50 according to the Kabat numbering system; wherein X1 is selected from Y and S; wherein X2 is selected from Y and S; wherein X3 is selected from Y and S; wherein X4 is selected from Y and S; wherein X5 is selected from Y and S; and wherein X6 is selected from Y and S; and
(iii) CDRH3 comprising an amino acid sequence: X1-X2-X3-X4-X5-X6-X7-X8-X9-X10-X11-X12-X13-X14-X15-X16-X17-X18-X19-D-Y (SEQ ID NO: 2939), wherein X1 is position 95 according to the Kabat numbering system, and wherein the amino acids at each of positions X1-X6 are selected from a pool of amino acids in a molar ratio of 20% Y, 26% S, 26% G, 13% R, 1% A, 1% D, 1% E, 1% F, 1% H, 1% I, 1% K, 1% L, 1% M, 1% N, 1% P, 1% Q, 1% T, 1% V, and 1% W; wherein the amino acids at each of positions X7-X17 are selected from a pool of amino acids in a molar ratio of 20% Y, 26% S, 26% G, 13% R, I% A, 1% D, 1% E, 1% F, 1% H, 1% I, 1% K, 1% L, 1% M, 1% N, 1% P, 1% Q, 1% T, 1% V, and 1% W, or are not present; wherein X18 is selected from G and A; and wherein X19 is selected from I, M, L, and F.

109. The method of claim 105, wherein the method further comprises:
(b) generating a plurality of polypeptides comprising:
(i) CDRL1 comprising a first consensus hypervariable sequence or variant thereof comprising substitution at one or more positions compared to a corresponding consensus hypervariable sequence;
(ii) CDRL2 comprising a second consensus hypervariable sequence or variant thereof comprising substitution at one or more positions compared to a corresponding consensus hypervariable sequence; and
(iii) CDRL3 comprising an amino acid sequence: Q-Q-X1-X2-X3-X4-P-X5-T (SEQ ID NO: 2653), wherein X1 is position 91 according to the Kabat numbering system, and wherein X1 is selected from Y and S, wherein X2 is selected from Y and S; wherein X3 is selected from Y and S; wherein X4 is selected from Y and S; and wherein X5 is selected from Y and S.

110. The method of claim 109, wherein the first consensus hypervariable sequence comprises a Kabat consensus CDRL1 sequence.

111. The method of claim 109, wherein the first consensus hypervariable sequence is R-A-S-Q-D-V-N-T-A-V-A (SEQ ID NO: 6).

112. The method of claim 109, wherein the second consensus hypervariable sequence comprises a Kabat consensus CDRL2 sequence.

113. The method of claim 109, wherein the second consensus hypervariable sequence is S-A-S-S-L-Y-S (SEQ ID NO: 7).

114. The method of claim 108, wherein the plurality of polypeptides are encoded by a plurality of polynucleotides.

115-116. (canceled)

117. A method of selecting for an antigen binding variable domain that binds to a target antigen from a library of antibody variable domains comprising:
(a) contacting the library of claim 97 with a target antigen;
(b) separating one or more polypeptides that specifically bind to the target antigen from polypeptides that do not specifically bind to the target antigen, recovering the one or more polypeptides that specifically bind to the target antigen, and incubating the one or more polypeptides that specifically bind to the target antigen in a series of solutions comprising decreasing amounts of the target antigen in a concentration from about 0.1 nM to about 1000 nM; and
(c) selecting the one or more polypeptides that specifically bind to the target antigen and that can bind to the lowest concentration of the target antigen or that have an affinity of about 0.1 nM to about 200 nM.

118. The method according to claim 117, wherein the target antigen is VEGF, insulin, HER2, IGF-1, or growth hormone.

119. The method according to claim 117, wherein the concentration of the target antigen is about 100 to about 250 nM.

120. The method according to claim 117, wherein the concentration of target antigen is about 25 to about 100 nM.

121-130. (canceled)

131. The antibody of claim 82, wherein the antibody specifically binds human VEGF.

132-140. (canceled)

141. The antibody of claim 126 or 127 131, comprising CDRH1, CDRH2, CDRH3, and CDRL3 sequences corresponding to the CDRH1, CDRH2, CDRH3, and CDRL3 sequences set forth in FIG. 10 for any one of Fabs 1-31, set forth in FIGS. 21A-21B for any one of clones A1-A60, or set forth in FIG. 28A for any one of clones F1-F31.

142. The antibody of claim 126 or 127 131, comprising CDRH1, CDRH2, CDRH3, and CDRL3 sequences corresponding to the CDRH1, CDRH2, CDRH3, and CDRL3 sequences set forth in FIGS. 14A-C for any one of clones 1-122.

143. An isolated polynucleotide encoding the antibody of claim 131.

144. A vector comprising the nucleic acid of claim 143.

145. A host cell transformed with the vector of claim 144.

146-148. (canceled)

149. A method of using the antibody of claim 131 for treating a disorder associated with abnormal angiogenesis in a mammal in need of treatment thereof comprising the step of administering the antibody to the mammal.

150-154. (canceled)

155. A method of treating a mammal suffering from or at risk of developing an inflammatory or immune disorder comprising the step of treating the mammal with a Fab of the antibody of claim 131.

156. The method of claim 155, wherein the inflammatory or immune disorder is rheumatoid arthritis.

157. The polypeptide of claim 11, wherein the polypeptide specifically binds insulin.

158-168. (canceled)

169. The antibody of claim 158, comprising CDRH1, CDRH2, CDRH3, and CDRL3 sequences corresponding to the CDRH1, CDRH2, CDRH3, and CDRL3 sequences set forth in FIGS. 15A-15B for any one of clones 1-105, set forth in FIG. 23A for any one of clones C1-C34, or set forth in FIG. 30A for any one of clones H43-H55.

170. An isolated polynucleotide encoding the polypeptide claim 157.

171. A vector comprising the nucleic acid of claim 170.

172. A host cell transformed with the vector of claim 171.

173-175. (canceled)

176. A method of using the polypeptide of claim 158 for treating an insulin-related disorder in a mammal in need of treatment thereof comprising the step of administering the antibody to the mammal.

177. (canceled)

178. The polypeptide of claim 18, wherein the polypeptide specifically binds HER2.

179-189. (canceled)

190. The antibody of claim 179, comprising CDRH1, CDRH2, CDRH3, and CDRL3 sequences corresponding to the CDRH1, CDRH2, CDRH3, and CDRL3 sequences set forth in FIG. 22A for any one of clones B1-B28 or FIG. 29A for any one of clones G29-G61.

191. An isolated polynucleotide encoding the polypeptide of claim 178.

192. A vector comprising the nucleic acid of claim 191.

193. A host cell transformed with the vector of claim 192.

194-196. (canceled)

197. A method of using the polypeptide of claim 179 for treating a HER2-related disorder in a mammal in need of treatment thereof comprising the step of administering the antibody to the mammal.

198. (canceled)

199. The polypeptide of claim 18, wherein the polypeptide specifically binds IGF-1.

200-210. (canceled)

211. The antibody of claim 200, comprising CDRH1, CDRH2, CDRH3, and CDRL3 sequences corresponding to the CDRH1, CDRH2, CDRH3, and CDRL3 sequences set forth in FIG. 24A for any one of clones D44-D96 or in FIG. 31A for any one of clones I67-I96.

212. An isolated polynucleotide encoding the polypeptide of claim 199.

213. A vector comprising the nucleic acid of claim 212.

214. A host cell transformed with the vector of claim 213.

215-217. (canceled)

218. A method of using the polypeptide of claim 199 for treating an IGF-1-related disorder in a mammal in need of treatment thereof comprising the step of administering the antibody to the mammal.

219. (canceled)

220. The polypeptide of claim 18 wherein the polypeptide specifically binds HGH.

221-231. (canceled)

232. The antibody of claim 220, comprising CDRH1, CDRH2, CDRH3, and CDRL3 sequences corresponding to the CDRH1, CDRH2, CDRH3, and CDRL3 sequences set forth in FIG. 25A for any one of clones E35-E43 or FIG. 32A for any one of clones J56-J66.

233. An isolated polynucleotide encoding the polypeptide of claim 220.

234. A vector comprising the nucleic acid of claim 233.

235. A host cell transformed with the vector of claim 234.

236-238. (canceled)

239. A method of using the polypeptide of claim 220 for treating an HGH-related disorder in a mammal in need of treatment thereof comprising the step of administering the antibody to the mammal.

240. (canceled)

The application's sequence listing, which the Patent Office published only in electronic form, follows.

SEQUENCE LISTING (2658 sequences)

SEQ ID NO: 1 - protein, 109 aa, Homo sapiens
DIQMTQSPSSLSASVGDRVTITCRASQDVNTAVAWYQQKPGKAPKLLIYSASSLYSGVPSRFSGSRSGTDFTLTISSLQPEDFATYYCQQHYTTPPTFGQGTKVEIKRT

SEQ ID NO: 2 - protein, 120 aa, Homo sapiens [sequence omitted]

SEQ ID NO: 3 - protein, 35 aa, Artificial Sequence
  Description of Artificial Sequence: Synthetic peptide
GRMKQLEDKVEELLSKNYHLENEVARLKKLVGERG

SEQ ID NO: 4 - protein, 11 aa, Artificial Sequence
  Description of Artificial Sequence: Synthetic peptide
DICLPRWGCLW

SEQ ID NO: 5 - protein, 12 aa, Artificial Sequence
  Description of Artificial Sequence: Synthetic peptide
TCPPCPAPELLG

SEQ ID NO: 6 - protein, 11 aa, Artificial Sequence
  Description of Artificial Sequence: Synthetic peptide
RASQDVNTAVA

SEQ ID NO: 7 - protein, 7 aa, Artificial Sequence
  Description of Artificial Sequence: Synthetic peptide
SASSLYS

SEQ ID NO: 8 - DNA, 54 bp, Artificial Sequence
  Description of Artificial Sequence: Synthetic oligonucleotide
  modified_base (19)..(19): a, c, g, t, unknown or other
gcagcttctggcttcaacntttmttmttmttmtatkcactgggtgcgtcaggcc

SEQ ID NO: 9 - DNA, 66 bp, Artificial Sequence
  Description of Artificial Sequence: Synthetic oligonucleotide
ggcctggaatgggttgcatmtatttmtycttmttmtrgctmtacttmttatgccgatagcgtcaag

SEQ ID NO: 10 - DNA, 54 bp, Artificial Sequence
  Description of Artificial Sequence: Synthetic oligonucleotide
  modified_base (34)..(34): a, c, g, t, unknown or other
acttattactgtcagcaatmttmttmttmtcygnttacgttcggacagggtacc

SEQ ID NO: 11 - DNA, 57 bp, Artificial Sequence
  Description of Artificial Sequence: Synthetic oligonucleotide
  modified_base (37)..(37): a, c, g, t, unknown or other
acttattactgtcagcaatmttmttmttmttmtcygnttacgttcggacagggtacc

SEQ ID NO: 12 - DNA, 60 bp, Artificial Sequence
  Description of Artificial Sequence: Synthetic oligonucleotide
  modified_base (40)..(40): a, c, g, t, unknown or other
acttattactgtcagcaatmttmttmttmttmttmtcygnttacgttcggacagggtacc

SEQ ID NO: 13 - DNA, 60 bp, Artificial Sequence
  Description of Artificial Sequence: Synthetic oligonucleotide
gtctattattgtgctcgctmttmttmttmttmttmtgstwtkgactactggggtcaagga

SEQ ID NO: 14 - DNA, 63 bp, Artificial Sequence
  Description of Artificial Sequence: Synthetic oligonucleotide
gtctattattgtgctcgctmttmttmttmttmttmttmtgstwtkgactactggggtcaagga

SEQ ID NO: 15 - DNA, 66 bp, Artificial Sequence
  Description of Artificial Sequence: Synthetic oligonucleotide
gtctattattgtgctcgctmttmttmttmttmttmttmttmtgstwtkgactactggggtcaagga

SEQ ID NO: 16 - DNA, 69 bp, Artificial Sequence
  Description of Artificial Sequence: Synthetic oligonucleotide
gtctattattgtgctcgctmttmttmttmttmttmttmttmttmtgstwtkgactactggggtcaagga

SEQ ID NO: 17 - DNA, 72 bp, Artificial Sequence
  Description of Artificial Sequence: Synthetic oligonucleotide
gtctattattgtgctcgctmttmttmttmttmttmttmttmttmttmtgstwtkgactactggggtcaagga

SEQ ID NO: 18 - DNA, 75 bp, Artificial Sequence
  Description of Artificial Sequence: Synthetic oligonucleotide
gtctattattgtgctcgctmttmttmttmttmttmttmttmttmttmttmtgstwtkgactactggggtcaagga

SEQ ID NO: 19 - DNA, 78 bp, Artificial Sequence
  Description of Artificial Sequence: Synthetic oligonucleotide
gtctattattgtgctcgctmttmttmttmttmttmttmttmttmttmttmttmtgstwtkgactactggggtcaagga

SEQ ID NO: 20 - DNA, 81 bp, Artificial Sequence
  Description of Artificial Sequence: Synthetic oligonucleotide
gtctattattgtgctcgctmttmttmttmttmttmttmttmttmttmttmttmttmtgstwtkgactactggggtcaagga

SEQ ID NO: 21 - DNA, 84 bp, Artificial Sequence
  Description of Artificial Sequence: Synthetic oligonucleotide
gtctattattgtgctcgctmttmttmttmttmttmttmttmttmttmttmttmttmttmtgstwtkgactactggggtcaagga

SEQ ID NO: 22 - DNA, 87 bp, Artificial Sequence
  Description of Artificial Sequence: Synthetic oligonucleotide
gtctattattgtgctcgctmttmttmttmttmttmttmttmttmttmttmttmttmttmttmtgstwtkgactactggggtcaagga

SEQ ID NO: 23 - DNA, 90 bp, Artificial Sequence
  Description of Artificial Sequence: Synthetic oligonucleotide
gtctattattgtgctcgctmttmttmttmttmttmttmttmttmttmttmttmttmttmttmttmtgstwtkgactactggggtcaagga

SEQ ID NO: 24 - DNA, 93 bp, Artificial Sequence
  Description of Artificial Sequence: Synthetic oligonucleotide
gtctattattgtgctcgctmttmttmttmttmttmttmttmttmttmttmttmttmttmttmttmttmtgstwtkgactactggggtcaagga

SEQ ID NO: 25 - DNA, 60 bp, Artificial Sequence
  Description of Artificial Sequence: Synthetic oligonucleotide
  modified_base (19)..(36): a, c, g, t, unknown or other and this region contains Tyr, Ser, Gly, Ala, Asp, Glu, Phe, His, Ile, Lys, Leu, Met, Asn, Pro, Gln, Arg, Thr, Val or Trp-enconding codons
  see specification as filed for detailed description of substitutions and preferred embodiments
gtctattattgtgctcgcnnnnnnnnnnnnnnnnnngstwtkgactactggggtcaagga

SEQ ID NO: 26 - DNA, 63 bp, Artificial Sequence
  Description of Artificial Sequence: Synthetic oligonucleotide
  modified_base (19)..(39): a, c, g, t, unknown or other and this region contains Tyr, Ser, Gly, Ala, Asp, Glu, Phe, His, Ile, Lys, Leu, Met, Asn, Pro, Gln, Arg, Thr, Val or Trp-enconding codons
  see specification as filed for detailed description of substitutions and preferred embodiments
gtctattattgtgctcgcnnnnnnnnnnnnnnnnnnnnngstwtkgactactggggtcaagga

SEQ ID NO: 27 - DNA, 66 bp, Artificial Sequence
  Description of Artificial Sequence: Synthetic oligonucleotide
  modified_base (19)..(42): a, c, g, t, unknown or other and this region contains Tyr, Ser, Gly, Ala, Asp, Glu, Phe, His, Ile, Lys, Leu, Met, Asn, Pro, Gln, Arg, Thr, Val or Trp-enconding codons
  see specification as filed for detailed description of substitutions and preferred embodiments
gtctattattgtgctcgcnnnnnnnnnnnnnnnnnnnnnnnngstwtkgactactggggtcaagga

SEQ ID NO: 28 - DNA, 69 bp, Artificial Sequence
  Description of Artificial Sequence: Synthetic oligonucleotide
  modified_base (19)..(45): a, c, g, t, unknown or other and this region contains Tyr, Ser, Gly, Ala, Asp, Glu, Phe, His, Ile, Lys, Leu, Met, Asn, Pro, Gln, Arg, Thr, Val or Trp-enconding codons
  see specification as filed for detailed description of substitutions and preferred embodiments
gtctattattgtgctcgcnnnnnnnnnnnnnnnnnnnnnnnnnnngstwtkgactactggggtcaagga

SEQ ID NO: 29 - DNA, 72 bp, Artificial Sequence
  Description of Artificial Sequence: Synthetic oligonucleotide
  modified_base (19)..(48): a, c, g, t, unknown or other and this region contains Tyr, Ser, Gly, Ala, Asp, Glu, Phe, His, Ile, Lys, Leu, Met, Asn, Pro, Gln, Arg, Thr, Val or Trp-enconding codons
  see specification as filed for detailed description of substitutions and preferred embodiments
gtctattattgtgctcgcnnnnnnnnnnnnnnnnnnnnnnnnnnnnnngstwtkgactactggggtcaagga

SEQ ID NO: 30 - DNA, 75 bp, Artificial Sequence
  Description of Artificial Sequence: Synthetic oligonucleotide
  modified_base (19)..(51): a, c, g, t, unknown or other and this region contains Tyr, Ser, Gly, Ala, Asp, Glu, Phe, His, Ile, Lys, Leu, Met, Asn, Pro, Gln, Arg, Thr, Val or Trp-enconding codons
  see specification as filed for detailed description of substitutions and preferred embodiments
gtctattattgtgctcgcnnnnnnnnnnnnnnnnnnnnnnnnnnnnnnnnngstwtkgactactggggtcaagga

SEQ ID NO: 31 - DNA, 78 bp, Artificial Sequence
  Description of Artificial Sequence: Synthetic oligonucleotide
  modified_base (19)..(54): a, c, g, t, unknown or other and this region contains Tyr, Ser, Gly, Ala, Asp, Glu, Phe, His, Ile, Lys, Leu, Met, Asn, Pro, Gln, Arg, Thr, Val or Trp-enconding codons
  see specification as filed for detailed description of substitutions and preferred embodiments
gtctattattgtgctcgcnnnnnnnnnnnnnnnnnnnnnnnnnnnnnnnnnnnngstwtkgactactggggtcaagga

SEQ ID NO: 32 - DNA, 81 bp, Artificial Sequence
  Description of Artificial Sequence: Synthetic oligonucleotide
  modified_base (19)..(57): a, c, g, t, unknown or other and this region contains Tyr, Ser, Gly, Ala, Asp, Glu, Phe, His, Ile, Lys, Leu, Met, Asn, Pro, Gln, Arg, Thr, Val or Trp-enconding codons
  see specification as filed for detailed description of substitutions and preferred embodiments
gtctattattgtgctcgcnnnnnnnnnnnnnnnnnnnnnnnnnnnnnnnnnnnnnnngstwtkgactactggggtcaagga

SEQ ID NO: 33 - DNA, 84 bp, Artificial Sequence
  Description of Artificial Sequence: Synthetic oligonucleotide
  modified_base (19)..(60): a, c, g, t, unknown or other and this region contains Tyr, Ser, Gly, Ala, Asp, Glu, Phe, His, Ile, Lys, Leu, Met, Asn, Pro, Gln, Arg, Thr, Val or Trp-enconding codons
  see specification as filed for detailed description of substitutions and preferred embodiments
gtctattattgtgctcgcnnnnnnnnnnnnnnnnnnnnnnnnnnnnnnnnnnnnnnnnnngstwtkgactactggggtcaagga

SEQ ID NO: 34 - DNA, 87 bp, Artificial Sequence
  Description of Artificial Sequence: Synthetic oligonucleotide
  modified_base (19)..(63): a, c, g, t, unknown or other and this region contains Tyr, Ser, Gly, Ala, Asp, Glu, Phe, His, Ile, Lys, Leu, Met, Asn, Pro, Gln, Arg, Thr, Val or Trp-enconding codons
  see specification as filed for detailed description of substitutions and preferred embodiments
gtctattattgtgctcgcnnnnnnnnnnnnnnnnnnnnnnnnnnnnnnnnnnnnnnnnnnnnngstwtkgactactggggtcaagga

SEQ ID NO: 35 - DNA, 90 bp, Artificial Sequence
  Description of Artificial Sequence: Synthetic oligonucleotide
  modified_base (19)..(66): a, c, g, t, unknown or other and this region contains Tyr, Ser, Gly, Ala, Asp, Glu, Phe, His, Ile, Lys, Leu, Met, Asn, Pro, Gln, Arg, Thr, Val or Trp-enconding codons
  see specification as filed for detailed description of substitutions and preferred embodiments
gtctattattgtgctcgcnnnnnnnnnnnnnnnnnnnnnnnnnnnnnnnnnnnnnnnnnnnnnnnngstwtkgactactggggtcaagga

SEQ ID NO: 36 - DNA, 93 bp, Artificial Sequence
  Description of Artificial Sequence: Synthetic oligonucleotide
  modified_base (19)..(69): a, c, g, t, unknown or other and this region contains Tyr, Ser, Gly, Ala, Asp, Glu, Phe, His, Ile, Lys, Leu, Met, Asn, Pro, Gln, Arg, Thr, Val or Trp-enconding codons
  see specification as filed for detailed description of substitutions and preferred embodiments
gtctattattgtgctcgcnnnnnnnnnnnnnnnnnnnnnnnnnnnnnnnnnnnnnnnnnnnnnnnnnnngstwtkgactactggggtcaagga

SEQ ID NO: 37 - protein, 11 aa, Artificial Sequence
  Description of Artificial Sequence: Synthetic peptide
QQSYYYYSPFT

SEQ ID NO: 38 - protein, 9 aa, Artificial Sequence
  Description of Artificial Sequence: Synthetic peptide
QQSSYSPFT

SEQ ID NO: 39 - protein, 9 aa, Artificial Sequence
  Description of Artificial Sequence: Synthetic peptide
QQSYSSLFT

SEQ ID NO: 40 - protein, 9 aa, Artificial Sequence
  Description of Artificial Sequence: Synthetic peptide
QQSYYSPFT

SEQ ID NO: 41 - protein, 9 aa, Artificial Sequence
  Description of Artificial Sequence: Synthetic peptide
QQSYYSPFT

SEQ ID NO: 42 - protein, 9 aa, Artificial Sequence
  Description of Artificial Sequence: Synthetic peptide
QQSYSSLLT

SEQ ID NO: 43 - protein, 9 aa, Artificial Sequence
  Description of Artificial Sequence: Synthetic peptide
QQSYSSLFT

SEQ ID NO: 44 - protein, 9 aa, Artificial Sequence
  Description of Artificial Sequence: Synthetic peptide
QQSYSSPIT

SEQ ID NO: 45 - protein, 9 aa, Artificial Sequence
  Description of Artificial Sequence: Synthetic peptide
QQSSYSPIT

SEQ ID NO: 46 - protein, 9 aa, Artificial Sequence
  Description of Artificial Sequence: Synthetic peptide
QQSSSSLFT

SEQ ID NO: 47 - protein, 9 aa, Artificial Sequence
  Description of Artificial Sequence: Synthetic peptide
QQSYYSLFT

SEQ ID NO: 48 - protein, 9 aa, Artificial Sequence
  Description of Artificial Sequence: Synthetic peptide
QQSSSSPLT

SEQ ID NO: 49 - protein, 9 aa, Artificial Sequence
  Description of Artificial Sequence: Synthetic peptide
QQSYYSPFT

SEQ ID NO: 50 - protein, 9 aa, Artificial Sequence
  Description of Artificial Sequence: Synthetic peptide
QQSYYSLIT

SEQ ID NO: 51 - protein, 9 aa, Artificial Sequence
  Description of Artificial Sequence: Synthetic peptide
QQYYYSPFT

SEQ ID NO: 52 - protein, 10 aa, Artificial Sequence
  Description of Artificial Sequence: Synthetic peptide
GFNLSSYSMH

SEQ ID NO: 53 - protein, 10 aa, Artificial Sequence
  Description of Artificial Sequence: Synthetic peptide
GFNLYSYSMH

SEQ ID NO: 54 - protein, 10 aa, Artificial Sequence
  Description of Artificial Sequence: Synthetic peptide
GFNIYSYSIH

SEQ ID NO: 55 - protein, 10 aa, Artificial Sequence
  Description of Artificial Sequence: Synthetic peptide
GFNLYSYSIH

SEQ ID NO: 56 - protein, 10 aa, Artificial Sequence
  Description of Artificial Sequence: Synthetic peptide
GFNFYSYSIH

SEQ ID NO: 57 - protein, 10 aa, Artificial Sequence
  Description of Artificial Sequence: Synthetic peptide
GFNIYSYSIH

SEQ ID NO: 58 - protein, 10 aa, Artificial Sequence
  Description of Artificial Sequence: Synthetic peptide
GFNFYSYSIH

SEQ ID NO: 59 - protein, 10 aa, Artificial Sequence
  Description of Artificial Sequence: Synthetic peptide
GFNLYYYSIH

SEQ ID NO: 60 - protein, 10 aa, Artificial Sequence
  Description of Artificial Sequence: Synthetic peptide
GFNLYSYSMH

SEQ ID NO: 61 - protein, 10 aa, Artificial Sequence
  Description of Artificial Sequence: Synthetic peptide
GFNFYYYSIH

SEQ ID NO: 62 - protein, 10 aa, Artificial Sequence
  Description of Artificial Sequence: Synthetic peptide
GFNLYSYSIH

SEQ ID NO: 63 - protein, 10 aa, Artificial Sequence
  Description of Artificial Sequence: Synthetic peptide
GFNFYYYSIH

SEQ ID NO: 64 - protein, 10 aa, Artificial Sequence
  Description of Artificial Sequence: Synthetic peptide
GFNFYSYSIH

SEQ ID NO: 65 - protein, 10 aa, Artificial Sequence
  Description of Artificial Sequence: Synthetic peptide
GFNVYSYSIH

SEQ ID NO: 66 - protein, 10 aa, Artificial Sequence
  Description of Artificial Sequence: Synthetic peptide
GFNLYSYSMH

SEQ ID NO: 67 - protein, 17 aa, Artificial Sequence
  Description of Artificial Sequence: Synthetic peptide
YISPYSGYTYYADSVKG

SEQ ID NO: 68 - protein, 17 aa, Artificial Sequence
  Description of Artificial Sequence: Synthetic peptide
SISPYYGSTYYADSVKG

SEQ ID NO: 69 - protein, 17 aa, Artificial Sequence
  Description of Artificial Sequence: Synthetic peptide
SISPYYGYTSYADSVKG

SEQ ID NO: 70 - protein, 17 aa, Artificial Sequence
  Description of Artificial Sequence: Synthetic peptide
SISPYYGYTSYADSVKG

SEQ ID NO: 71 - protein, 17 aa, Artificial Sequence
  Description of Artificial Sequence: Synthetic peptide
SISPYYGYTYYADSVKG

SEQ ID NO: 72 - protein, 17 aa, Artificial Sequence
  Description of Artificial Sequence: Synthetic peptide
YISPYYGSTSYADSVKG

SEQ ID NO: 73 - protein, 17 aa, Artificial Sequence
  Description of Artificial Sequence: Synthetic peptide
SISPYYGYTSYADSVKG

SEQ ID NO: 74 - protein, 17 aa, Artificial Sequence
  Description of Artificial Sequence: Synthetic peptide
YISPYYGYTYYADSVKG

SEQ ID NO: 75 - protein, 17 aa, Artificial Sequence
  Description of Artificial Sequence: Synthetic peptide
SISPYYGYTYYADSVKG

SEQ ID NO: 76 - protein, 17 aa, Artificial Sequence
  Description of Artificial Sequence: Synthetic peptide
SISPYYGYTSYADSVKG

SEQ ID NO: 77 - protein, 17 aa, Artificial Sequence
  Description of Artificial Sequence: Synthetic peptide
SISPYYGYTSYADSVKG

SEQ ID NO: 78 - protein, 17 aa, Artificial Sequence
  Description of Artificial Sequence: Synthetic peptide
YISPYSGYTSYADSVKG

SEQ ID NO: 79 - protein, 17 aa, Artificial Sequence
  Description of Artificial Sequence: Synthetic peptide
SISPYYGYTYYADSVKG

SEQ ID NO: 80 - protein, 17 aa, Artificial Sequence
  Description of Artificial Sequence: Synthetic peptide
YISPYYGYTSYADSVKG

SEQ ID NO: 81 - protein, 17 aa, Artificial Sequence
  Description of Artificial Sequence: Synthetic peptide
SISPYYGYTYYADSVKG

SEQ ID NO: 82 - protein, 16 aa, Artificial Sequence
  Description of Artificial Sequence: Synthetic peptide
SYYSYSSSSSSSGLDY

SEQ ID NO: 83 - protein, 16 aa, Artificial Sequence
  Description of Artificial Sequence: Synthetic peptide
SYYSYSYSSSSSGLDY

SEQ ID NO: 84 - protein, 16 aa, Artificial Sequence
  Description of Artificial Sequence: Synthetic peptide
YSYYYYYSYYYSAFDY

SEQ ID NO: 85 - protein, 16 aa, Artificial Sequence
  Description of Artificial Sequence: Synthetic peptide
YYYYYSSSSSYYGMDY

SEQ ID NO: 86 - protein, 16 aa, Artificial Sequence
  Description of Artificial Sequence: Synthetic peptide
SYYSYSYSSYYYAMDY

SEQ ID NO: 87 - protein, 16 aa, Artificial Sequence
  Description of Artificial Sequence: Synthetic peptide
YYYSYSSSSYYYGMDY

SEQ ID NO: 88 - protein, 16 aa, Artificial Sequence
  Description of Artificial Sequence: Synthetic peptide
SYYSYSYSYYYYALDY

SEQ ID NO: 89 - protein, 16 aa, Artificial Sequence
  Description of Artificial Sequence: Synthetic peptide
YSYSYSSSSSSSGMDY

SEQ ID NO: 90 - protein, 16 aa, Artificial Sequence
  Description of Artificial Sequence: Synthetic peptide
YYYYYSYSSYYSAFDY

SEQ ID NO: 91 - protein, 20 aa, Artificial Sequence
  Description of Artificial Sequence: Synthetic peptide
YSYSYSYSSSYYSSSSAMDY

SEQ ID NO: 92 - protein, 15 aa, Artificial Sequence
  Description of Artificial Sequence: Synthetic peptide
YYYSYSSYSYSALDY

SEQ ID NO: 93 - protein, 15 aa, Artificial Sequence
  Description of Artificial Sequence: Synthetic peptide
YYYSYSSYSYSGLDY

SEQ ID NO: 94 - protein, 16 aa, Artificial Sequence
  Description of Artificial Sequence: Synthetic peptide
SYYSYSYSSYYYAIDY

SEQ ID NO: 95 - protein, 16 aa, Artificial Sequence
  Description of Artificial Sequence: Synthetic peptide
YYYSYYSYSSYSAFDY

SEQ ID NO: 96 - protein, 17 aa, Artificial Sequence
  Description of Artificial Sequence: Synthetic peptide
YYYYYSSSSYYSSGLDY

SEQ ID NO: 97 - protein, 9 aa, Artificial Sequence
  Description of Artificial Sequence: Synthetic peptide
QQSSYSLFT

SEQ ID NO: 98 - protein, 11 aa, Artificial Sequence
  Description of Artificial Sequence: Synthetic peptide
QQYSYYYYPFT

SEQ ID NO: 99 - protein, 11 aa, Artificial Sequence
  Description of Artificial Sequence: Synthetic peptide
QQYSSSYYLFT

SEQ ID NO: 100 - protein, 10 aa, Artificial Sequence
  Description of Artificial Sequence: Synthetic peptide
QQYYSYSLFT

SEQ ID NO: 101 - protein, 10 aa, Artificial Sequence
  Description of Artificial Sequence: Synthetic peptide
QQYSYYSLFT

SEQ ID NO: 102 - protein, 11 aa, Artificial Sequence
  Description of Artificial Sequence: Synthetic peptide
QQYSSYSYLVT

SEQ ID NO: 103 - protein, 11 aa, Artificial Sequence
  Description of Artificial Sequence: Synthetic peptide
QQSSYSYSPFT

SEQ ID NO: 104 - protein, 9 aa, Artificial Sequence
  Description of Artificial Sequence: Synthetic peptide
QQYSSYLFT

SEQ ID NO: 105 - protein, 9 aa, Artificial Sequence
  Description of Artificial Sequence: Synthetic peptide
QQSYYSPIT

SEQ ID NO: 106 - protein, 9 aa, Artificial Sequence
  Description of Artificial Sequence: Synthetic peptide
QQYYYSPFT

SEQ ID NO: 107 - protein, 9 aa, Artificial Sequence
  Description of Artificial Sequence: Synthetic peptide
QQYYYSLIT

SEQ ID NO: 108 - protein, 9 aa, Artificial Sequence
  Description of Artificial Sequence: Synthetic peptide
QQSYSYLFT

SEQ ID NO: 109 - protein, 11 aa, Artificial Sequence
  Description of Artificial Sequence: Synthetic peptide
QQYYYSSYPVT

SEQ ID NO: 110 - protein, 9 aa, Artificial Sequence
  Description of Artificial Sequence: Synthetic peptide
QQYYYSPLT

SEQ ID NO: 111 - protein, 10 aa, Artificial Sequence
  Description of Artificial Sequence: Synthetic peptide
GFNFSYSYIH

SEQ ID NO: 112 - protein, 10 aa, Artificial Sequence
  Description of Artificial Sequence: Synthetic peptide
GFNFSSSSIH

SEQ ID NO: 113 - protein, 10 aa, Artificial Sequence
  Description of Artificial Sequence: Synthetic peptide
GFNVSYSYMH

SEQ ID NO: 114 - protein, 10 aa, Artificial Sequence
  Description of Artificial Sequence: Synthetic peptide
GFNISYSSIH

SEQ ID NO: 115 - protein, 10 aa, Artificial Sequence
  Description of Artificial Sequence: Synthetic peptide
GFNISSSSMH

SEQ ID NO: 116 - protein, 10 aa, Artificial Sequence
  Description of Artificial Sequence: Synthetic peptide
GFNISSYSIH

SEQ ID NO: 117 - protein, 10 aa, Artificial Sequence
  Description of Artificial Sequence: Synthetic peptide
GFNFYYYYIH

SEQ ID NO: 118 - protein, 10 aa, Artificial Sequence
  Description of Artificial Sequence: Synthetic peptide
GFNFSYSYIH

SEQ ID NO: 119 - protein, 10 aa, Artificial Sequence
  Description of Artificial Sequence: Synthetic peptide
GFNISYYSIH

SEQ ID NO: 120 - protein, 10 aa, Artificial Sequence
  Description of Artificial Sequence: Synthetic peptide
GFNISSSSIH

SEQ ID NO: 121 - protein, 10 aa, Artificial Sequence
  Description of Artificial Sequence: Synthetic peptide
GFNISYSYIH

SEQ ID NO: 122 - protein, 10 aa, Artificial Sequence
  Description of Artificial Sequence: Synthetic peptide
GFNLYYSYMH

SEQ ID NO: 123 - protein, 10 aa, Artificial Sequence
  Description of Artificial Sequence: Synthetic peptide
GFNFYSYSIH

SEQ ID NO: 124 - protein, 10 aa, Artificial Sequence
  Description of Artificial Sequence: Synthetic peptide
GFNIYYYSIH

SEQ ID NO: 125 - protein, 10 aa, Artificial Sequence
  Description of Artificial Sequence: Synthetic peptide
GFNFYYSYIH

SEQ ID NO: 126 - protein, 17 aa, Artificial Sequence
  Description of Artificial Sequence: Synthetic peptide
SISPSSGYTYYADSVKG

SEQ ID NO: 127 - protein, 17 aa, Artificial Sequence
  Description of Artificial Sequence: Synthetic peptide
YIYPSYGYTSYADSVKG

SEQ ID NO: 128 - protein, 17 aa, Artificial Sequence
  Description of Artificial Sequence: Synthetic peptide
SIYPSSGYTYYADSVKG

SEQ ID NO: 129 - protein, 17 aa, Artificial Sequence
  Description of Artificial Sequence: Synthetic peptide
SIYSYYGSTYYADSVKG

SEQ ID NO: 130 - protein, 17 aa, Artificial Sequence
  Description of Artificial Sequence: Synthetic peptide
SISSYSGYTSYADSVKG

SEQ ID NO: 131 - protein, 16 aa, Artificial Sequence
  Description of Artificial Sequence: Synthetic peptide
SISYYGYTSYADSVKG

SEQ ID NO: 132 - protein, 17 aa, Artificial Sequence
  Description of Artificial Sequence: Synthetic peptide
SISSYSGSTSYADSVKG

SEQ ID NO: 133 - protein, 17 aa, Artificial Sequence
  Description of Artificial Sequence: Synthetic peptide
SISPYSGYTSYADSVKG

SEQ ID NO: 134 - protein, 17 aa, Artificial Sequence
  Description of Artificial Sequence: Synthetic peptide
YIYPYSGYTSYADSVKG

SEQ ID NO: 135 - protein, 17 aa, Artificial Sequence
  Description of Artificial Sequence: Synthetic peptide
SISSYSGSTSYADSVKG

SEQ ID NO: 136 - protein, 17 aa, Artificial Sequence
  Description of Artificial Sequence: Synthetic peptide
SISSYYGSTYYADSVKG

SEQ ID NO: 137 - protein, 17 aa, Artificial Sequence
  Description of Artificial Sequence: Synthetic peptide
SIYSYSGSTSYADSVKG

SEQ ID NO: 138 - protein, 17 aa, Artificial Sequence
  Description of Artificial Sequence: Synthetic peptide
SISPYYGYTYYADSVKG

SEQ ID NO: 139 - protein, 17 aa, Artificial Sequence
  Description of Artificial Sequence: Synthetic peptide
SISPYYGYTSYADSVKG

SEQ ID NO: 140 - protein, 17 aa, Artificial Sequence
  Description of Artificial Sequence: Synthetic peptide
SISPSSGYTYYADSVKG

SEQ ID NO: 141 - protein, 17 aa, Artificial Sequence
  Description of Artificial Sequence: Synthetic peptide
YISPSSGYTSYADSVKG

SEQ ID NO: 142 - protein, 16 aa, Artificial Sequence
  Description of Artificial Sequence: Synthetic peptide
YYFYYSGSSHTEGFDY

SEQ ID NO: 143 - protein, 9 aa, Artificial Sequence
  Description of Artificial Sequence: Synthetic peptide
YYGTGAMDY

SEQ ID NO: 144 - protein, 20 aa, Artificial Sequence
  Description of Artificial Sequence: Synthetic peptide
GGYGYYISYYWYYASTAIDY

SEQ ID NO: 145 - protein, 15 aa, Artificial Sequence
  Description of Artificial Sequence: Synthetic peptide
GTGYGRYYWWRGFDY

SEQ ID NO: 146 - protein, 13 aa, Artificial Sequence
  Description of Artificial Sequence: Synthetic peptide
GFYMKGGFRAMDY

SEQ ID NO: 147 - protein, 11 aa, Artificial Sequence
  Description of Artificial Sequence: Synthetic peptide
GAVWYYYGMDY

SEQ ID NO: 148 - protein, 19 aa, Artificial Sequence
  Description of Artificial Sequence: Synthetic peptide
MFNYREVGFMWSGYYGLDY

SEQ ID NO: 149 - protein, 12 aa, Artificial Sequence
  Description of Artificial Sequence: Synthetic peptide
SYTYYGRYGLDY

SEQ ID NO: 150 - protein, 12 aa, Artificial Sequence
  Description of Artificial Sequence: Synthetic peptide
FSGGIWGRGLDY

SEQ ID NO: 151 - protein, 12 aa, Artificial Sequence
  Description of Artificial Sequence: Synthetic peptide
YQYYYWKYAFDY

SEQ ID NO: 152 - protein, 15 aa, Artificial Sequence
  Description of Artificial Sequence: Synthetic peptide
MYYYYSYFSSSAMDY

SEQ ID NO: 153 - protein, 12 aa, Artificial Sequence
  Description of Artificial Sequence: Synthetic peptide
GYYHRSWSGIDY

SEQ ID NO: 154 - protein, 18 aa, Artificial Sequence
  Description of Artificial Sequence: Synthetic peptide
KYYYWQYSGKFYSSAIDY

SEQ ID NO: 155 - protein, 16 aa, Artificial Sequence
  Description of Artificial Sequence: Synthetic peptide
YSYYYFYSSSYSAMDY

SEQ ID NO: 156 - protein, 21 aa, Artificial Sequence
  Description of Artificial Sequence: Synthetic peptide
QYYYTYRRYIYYYYMQLAMDY

SEQ ID NO: 157 - protein, 11 aa, Artificial Sequence
  Description of Artificial Sequence: Synthetic peptide
SYYYSSFGIDY

SEQ ID NO: 158 - DNA, 48 bp, Artificial Sequence
  Description of Artificial Sequence: Synthetic oligonucleotide
gcagcttctggcttctmtatttmttmttmttmtatacactgggtgcgt

SEQ ID NO: 159 - DNA, 60 bp, Artificial Sequence
  Description of Artificial Sequence: Synthetic oligonucleotide
ctggaatgggttgcatmtatttmtccatmttmtggttmtacttmttatgccgatagcgtc

SEQ ID NO: 160 - DNA, 54 bp, Artificial Sequence
  Description of Artificial Sequence: Synthetic oligonucleotide
acttattactgtcagcaatmttmttmttmtccatmtacgttcggacagggtacc

SEQ ID NO: 161 - DNA, 60 bp, Artificial Sequence; identical to SEQ ID NO: 25
  Description of Artificial Sequence: Synthetic oligonucleotide
  modified_base (19)..(36): a, c, g, t, unknown or other and this region contains Tyr, Ser, Gly, Arg, Asp, Glu, Phe, His, Ile, Lys, Leu, Met, Asn, Gln, Thr, Val, Trp, Pro or Ala-enconding codons
  see specification as filed for detailed description of substitutions and preferred embodiments

SEQ ID NO: 162 - DNA, 63 bp, Artificial Sequence; identical to SEQ ID NO: 26
  Description of Artificial Sequence: Synthetic oligonucleotide
  modified_base (19)..(39): a, c, g, t, unknown or other and this region contains Tyr, Ser, Gly, Arg, Asp, Glu, Phe, His, Ile, Lys, Leu, Met, Asn, Gln, Thr, Val, Trp, Pro or Ala-enconding codons
  see specification as filed for detailed description of substitutions and preferred embodiments

SEQ ID NO: 163 - DNA, 66 bp, Artificial Sequence; identical to SEQ ID NO: 27
  Description of Artificial Sequence: Synthetic oligonucleotide
  modified_base (19)..(42): a, c, g, t, unknown or other and this region contains Tyr, Ser, Gly, Arg, Asp, Glu, Phe, His, Ile, Lys, Leu, Met, Asn, Gln, Thr, Val, Trp, Pro or Ala-enconding codons
  see specification as filed for detailed description of substitutions and preferred embodiments

SEQ ID NO: 164 - DNA, 69 bp, Artificial Sequence; identical to SEQ ID NO: 28
  Description of Artificial Sequence: Synthetic oligonucleotide
  modified_base (19)..(45): a, c, g, t, unknown or other and this region contains Tyr, Ser, Gly, Arg, Asp, Glu, Phe, His, Ile, Lys, Leu, Met, Asn, Gln, Thr, Val, Trp, Pro or Ala-enconding codons
  see specification as filed for detailed description of substitutions and preferred embodiments

SEQ ID NO: 165 - DNA, 72 bp, Artificial Sequence; identical to SEQ ID NO: 29
  Description of Artificial Sequence: Synthetic oligonucleotide
  modified_base (19)..(48): a, c, g, t, unknown or other and this region contains Tyr, Ser, Gly, Arg, Asp, Glu, Phe, His, Ile, Lys, Leu, Met, Asn, Gln, Thr, Val, Trp, Pro or Ala-enconding codons
  see specification as filed for detailed description of substitutions and preferred embodiments

SEQ ID NO: 166 - DNA, 75 bp, Artificial Sequence; identical to SEQ ID NO: 30
  Description of Artificial Sequence: Synthetic oligonucleotide
  modified_base (19)..(51): a, c, g, t, unknown or other and this region contains Tyr, Ser, Gly, Arg, Asp, Glu, Phe, His, Ile, Lys, Leu, Met, Asn, Gln, Thr, Val, Trp, Pro or Ala-enconding codons
  see specification as filed for detailed description of substitutions and preferred embodiments

SEQ ID NO: 167 - DNA, 78 bp, Artificial Sequence; identical to SEQ ID NO: 31
  Description of Artificial Sequence: Synthetic oligonucleotide
  modified_base (19)..(54): a, c, g, t, unknown or other and this region contains Tyr, Ser, Gly, Arg, Asp, Glu, Phe, His, Ile, Lys, Leu, Met, Asn, Gln, Thr, Val, Trp, Pro or Ala-enconding codons
  see specification as filed for detailed description of substitutions and preferred embodiments

SEQ ID NO: 168 - DNA, 81 bp, Artificial Sequence; identical to SEQ ID NO: 32
  Description of Artificial Sequence: Synthetic oligonucleotide
  modified_base (19)..(57): a, c, g, t, unknown or other and this region contains Tyr, Ser, Gly, Arg, Asp, Glu, Phe, His, Ile, Lys, Leu, Met, Asn, Gln, Thr, Val, Trp, Pro or Ala-enconding codons
  see specification as filed for detailed description of substitutions and preferred embodiments

SEQ ID NO: 169 - DNA, 84 bp, Artificial Sequence; identical to SEQ ID NO: 33
  Description of Artificial Sequence: Synthetic oligonucleotide
  modified_base (19)..(60): a, c, g, t, unknown or other and this region contains Tyr, Ser, Gly, Arg, Asp, Glu, Phe, His, Ile, Lys, Leu, Met, Asn, Gln, Thr, Val, Trp, Pro or Ala-enconding codons
  see specification as filed for detailed description of substitutions and preferred embodiments

SEQ ID NO: 170 - DNA, 87 bp, Artificial Sequence; identical to SEQ ID NO: 34
  Description of Artificial Sequence: Synthetic oligonucleotide
  modified_base (19)..(63): a, c, g, t, unknown or other and this region contains Tyr, Ser, Gly, Arg, Asp, Glu, Phe, His, Ile, Lys, Leu, Met, Asn, Gln, Thr, Val, Trp, Pro or Ala-enconding codons
  see specification as filed for detailed description of substitutions and preferred embodiments

SEQ ID NO: 171 - DNA, 90 bp, Artificial Sequence; identical to SEQ ID NO: 35
  Description of Artificial Sequence: Synthetic oligonucleotide
  modified_base (19)..(66): a, c, g, t, unknown or other and this region contains Tyr, Ser, Gly, Arg, Asp, Glu, Phe, His, Ile, Lys, Leu, Met, Asn, Gln, Thr, Val, Trp, Pro or Ala-enconding codons
  see specification as filed for detailed description of substitutions and preferred embodiments

SEQ ID NO: 172 - DNA, 93 bp, Artificial Sequence; identical to SEQ ID NO: 36
  Description of Artificial Sequence: Synthetic oligonucleotide
  modified_base (19)..(69): a, c, g, t, unknown or other and this region contains Tyr, Ser, Gly, Arg, Asp, Glu, Phe, His, Ile, Lys, Leu, Met, Asn, Gln, Thr, Val, Trp, Pro or Ala-enconding codons
  see specification as filed for detailed description of substitutions and preferred embodiments

SEQ ID NO: 173 - DNA, 60 bp, Artificial Sequence; identical to SEQ ID NO: 25
  Description of Artificial Sequence: Synthetic oligonucleotide
  modified_base (19)..(36): a, c, g, t, unknown or other and this region contains Tyr, Ser, Gly, Arg, Asp, Glu, Phe, His, Ile, Lys, Leu, Met, Asn, Gln, Thr, Val, Trp, Pro or Ala-enconding codons
  see specification as filed for detailed description of substitutions and preferred embodiments

SEQ ID NO: 174 - DNA, 63 bp, Artificial Sequence; identical to SEQ ID NO: 26
  Description of Artificial Sequence: Synthetic oligonucleotide
  modified_base (19)..(39): a, c, g, t, unknown or other and this region contains Tyr, Ser, Gly, Arg, Asp, Glu, Phe, His, Ile, Lys, Leu, Met, Asn, Gln, Thr, Val, Trp, Pro or Ala-enconding codons
  see specification as filed for detailed description of substitutions and preferred embodiments

SEQ ID NO: 175 - DNA, 66 bp, Artificial Sequence; identical to SEQ ID NO: 27
  Description of Artificial Sequence: Synthetic oligonucleotide
  modified_base (19)..(42): a, c, g, t, unknown or other and this region contains Tyr, Ser, Gly, Arg, Asp, Glu, Phe, His, Ile, Lys, Leu, Met, Asn, Gln, Thr, Val, Trp, Pro or Ala-enconding codons
  see specification as filed for detailed description of substitutions and preferred embodiments

SEQ ID NO: 176 - DNA, 69 bp, Artificial Sequence; identical to SEQ ID NO: 28
  Description of Artificial Sequence: Synthetic oligonucleotide
  modified_base (19)..(45): a, c, g, t, unknown or other and this region contains Tyr, Ser, Gly, Arg, Asp, Glu, Phe, His, Ile, Lys, Leu, Met, Asn, Gln, Thr, Val, Trp, Pro or Ala-enconding codons
  see specification as filed for detailed description of substitutions and preferred embodiments

SEQ ID NO: 177 - DNA, 72 bp, Artificial Sequence; identical to SEQ ID NO: 29
  Description of Artificial Sequence: Synthetic oligonucleotide
  modified_base (19)..(48): a, c, g, t, unknown or other and this region contains Tyr, Ser, Gly, Arg, Asp, Glu, Phe, His, Ile, Lys, Leu, Met, Asn, Gln, Thr, Val, Trp, Pro or Ala-enconding codons
  see specification as filed for detailed description of substitutions and preferred embodiments

SEQ ID NO: 178 - DNA, 75 bp, Artificial Sequence; identical to SEQ ID NO: 30
  Description of Artificial Sequence: Synthetic oligonucleotide
  modified_base (19)..(51): a, c, g, t, unknown or other and this region contains Tyr, Ser, Gly, Arg, Asp, Glu, Phe, His, Ile, Lys, Leu, Met, Asn, Gln, Thr, Val, Trp, Pro or Ala-enconding codons
  see specification as filed for detailed description of substitutions and preferred embodiments

SEQ ID NO: 179 - DNA, 78 bp, Artificial Sequence; identical to SEQ ID NO: 31
  Description of Artificial Sequence: Synthetic oligonucleotide
  modified_base (19)..(54): a, c, g, t, unknown or other and this region contains Tyr, Ser, Gly, Arg, Asp, Glu, Phe, His, Ile, Lys, Leu, Met, Asn, Gln, Thr, Val, Trp, Pro or Ala-enconding codons
  see specification as filed for detailed description of substitutions and preferred embodiments

SEQ ID NO: 180 - DNA, 81 bp, Artificial Sequence; identical to SEQ ID NO: 32
  Description of Artificial Sequence: Synthetic oligonucleotide
  modified_base (19)..(57): a, c, g, t, unknown or other and this region contains Tyr, Ser, Gly, Arg, Asp, Glu, Phe, His, Ile, Lys, Leu, Met, Asn, Gln, Thr, Val, Trp, Pro or Ala-enconding codons
  see specification as filed for detailed description of substitutions and preferred embodiments

SEQ ID NO: 181 - DNA, 84 bp, Artificial Sequence; identical to SEQ ID NO: 33
  Description of Artificial Sequence: Synthetic oligonucleotide
  modified_base (19)..(60): a, c, g, t, unknown or other and this region contains Tyr, Ser, Gly, Arg, Asp, Glu, Phe, His, Ile, Lys, Leu, Met, Asn, Gln, Thr, Val, Trp, Pro or Ala-enconding codons
  see specification as filed for detailed description of substitutions and preferred embodiments

SEQ ID NO: 182 - DNA, 87 bp, Artificial Sequence; identical to SEQ ID NO: 34
  Description of Artificial Sequence: Synthetic oligonucleotide
  modified_base (19)..(63): a, c, g, t, unknown or other and this region contains Tyr, Ser, Gly, Arg, Asp, Glu, Phe, His, Ile, Lys, Leu, Met, Asn, Gln, Thr, Val, Trp, Pro or Ala-enconding codons
  see specification as filed for detailed description of substitutions and preferred embodiments

SEQ ID NO: 183 - DNA, 90 bp, Artificial Sequence; identical to SEQ ID NO: 35
  Description of Artificial Sequence: Synthetic oligonucleotide
  modified_base (19)..(66): a, c, g, t, unknown or other and this region contains Tyr, Ser, Gly, Arg, Asp, Glu, Phe, His, Ile, Lys, Leu, Met, Asn, Gln, Thr, Val, Trp, Pro or Ala-enconding codons
  see specification as filed for detailed description of substitutions and preferred embodiments

SEQ ID NO: 184 - DNA, 93 bp, Artificial Sequence; identical to SEQ ID NO: 36
  Description of Artificial Sequence: Synthetic oligonucleotide
  modified_base (19)..(69): a, c, g, t, unknown or other and this region contains Tyr, Ser, Gly, Arg, Asp, Glu, Phe, His, Ile, Lys, Leu, Met, Asn, Gln, Thr, Val, Trp, Pro or Ala-enconding codons
  see specification as filed for detailed description of substitutions and preferred embodiments

SEQ ID NO: 185 - DNA, 60 bp, Artificial Sequence; identical to SEQ ID NO: 25
  Description of Artificial Sequence: Synthetic oligonucleotide
  modified_base (19)..(36): a, c, g, t, unknown or other and this region contains Tyr, Ser, Gly, Arg, Asp, Glu, Phe, His, Ile, Lys, Leu, Met, Asn, Gln, Thr, Val, Trp, Pro or Ala-enconding codons
  see specification as filed for detailed description of substitutions and preferred embodiments

SEQ ID NO: 186 - DNA, 63 bp, Artificial Sequence; identical to SEQ ID NO: 26
  Description of Artificial Sequence: Synthetic oligonucleotide
  modified_base (19)..(39): a, c, g, t, unknown or other and this region contains Tyr, Ser, Gly, Arg, Asp, Glu, Phe, His, Ile, Lys, Leu, Met, Asn, Gln, Thr, Val, Trp, Pro or Ala-enconding codons
  see specification as filed for detailed description of substitutions and preferred embodiments

SEQ ID NO: 187 - DNA, 66 bp, Artificial Sequence; identical to SEQ ID NO: 27
  Description of Artificial Sequence: Synthetic oligonucleotide
  modified_base (19)..(42): a, c, g, t, unknown or other and this region contains Tyr, Ser, Gly, Arg, Asp, Glu, Phe, His, Ile, Lys, Leu, Met, Asn, Gln, Thr, Val, Trp, Pro or Ala-enconding codons
  see specification as filed for detailed description of substitutions and preferred embodiments

SEQ ID NO: 188 - DNA, 69 bp, Artificial Sequence; identical to SEQ ID NO: 28
  Description of Artificial Sequence: Synthetic oligonucleotide
  modified_base (19)..(45): a, c, g, t, unknown or other and this region contains Tyr, Ser, Gly, Arg, Asp, Glu, Phe, His, Ile, Lys, Leu, Met, Asn, Gln, Thr, Val, Trp, Pro or Ala-enconding codons
  see specification as filed for detailed description of substitutions and preferred embodiments

SEQ ID NO: 189 - DNA, 72 bp, Artificial Sequence; identical to SEQ ID NO: 29
  Description of Artificial Sequence: Synthetic oligonucleotide
  modified_base (19)..(48): a, c, g, t, unknown or other and this region contains Tyr, Ser, Gly, Arg, Asp, Glu, Phe, His, Ile, Lys, Leu, Met, Asn, Gln, Thr, Val, Trp, Pro or Ala-enconding codons
  see specification as filed for detailed description of substitutions and preferred embodiments

SEQ ID NO: 190 - DNA, 75 bp, Artificial Sequence; identical to SEQ ID NO: 30
  Description of Artificial Sequence: Synthetic oligonucleotide
  modified_base (19)..(51): a, c, g, t, unknown or other and this region contains Tyr, Ser, Gly, Arg, Asp, Glu, Phe, His, Ile, Lys, Leu, Met, Asn, Gln, Thr, Val, Trp, Pro or Ala-enconding codons
  see specification as filed for detailed description of substitutions and preferred embodiments

SEQ ID NO: 191 - DNA, 78 bp, Artificial Sequence; identical to SEQ ID NO: 31
  Description of Artificial Sequence: Synthetic oligonucleotide
  modified_base (19)..(54): a, c, g, t, unknown or other and this region contains Tyr, Ser, Gly, Arg, Asp, Glu, Phe, His, Ile, Lys, Leu, Met, Asn, Gln, Thr, Val, Trp, Pro or Ala-enconding codons
  see specification as filed for detailed description of substitutions and preferred embodiments

SEQ ID NO: 192 - DNA, 81 bp, Artificial Sequence; identical to SEQ ID NO: 32
  Description of Artificial Sequence: Synthetic oligonucleotide
  modified_base (19)..(57): a, c, g, t, unknown or other and this region contains Tyr, Ser, Gly, Arg, Asp, Glu, Phe, His, Ile, Lys, Leu, Met, Asn, Gln, Thr, Val, Trp, Pro or Ala-enconding codons
  see specification as filed for detailed description of substitutions and preferred embodiments

SEQ ID NO: 193 - DNA, 84 bp, Artificial Sequence; identical to SEQ ID NO: 33
  Description of Artificial Sequence: Synthetic oligonucleotide
  modified_base (19)..(60): a, c, g, t, unknown or other and this region contains Tyr, Ser, Gly, Arg, Asp, Glu, Phe, His, Ile, Lys, Leu, Met, Asn, Gln, Thr, Val, Trp, Pro or Ala-enconding codons
  see specification as filed for detailed description of substitutions and preferred embodiments

SEQ ID NO: 194 - DNA, 87 bp, Artificial Sequence; identical to SEQ ID NO: 34
  Description of Artificial Sequence: Synthetic oligonucleotide
  modified_base (19)..(63): a, c, g, t, unknown or other and this region contains Tyr, Ser, Gly, Arg, Asp, Glu, Phe, His, Ile, Lys, Leu, Met, Asn, Gln, Thr, Val, Trp, Pro or Ala-enconding codons
  see specification as filed for detailed description of substitutions and preferred embodiments

SEQ ID NO: 195 - DNA, 90 bp, Artificial Sequence; identical to SEQ ID NO: 35
  Description of Artificial Sequence: Synthetic oligonucleotide
  modified_base (19)..(66): a, c, g, t, unknown or other and this region contains Tyr, Ser, Gly, Arg, Asp, Glu, Phe, His, Ile, Lys, Leu, Met, Asn, Gln, Thr, Val, Trp, Pro or Ala-enconding codons
  see specification as filed for detailed description of substitutions and preferred embodiments

SEQ ID NO: 196 - DNA, 93 bp, Artificial Sequence; identical to SEQ ID NO: 36
  Description of Artificial Sequence: Synthetic oligonucleotide
  modified_base (19)..(69): a, c, g, t, unknown or other and this region contains Tyr, Ser, Gly, Arg, Asp, Glu, Phe, His, Ile, Lys, Leu, Met, Asn, Gln, Thr, Val, Trp, Pro or Ala-enconding codons
  see specification as filed for detailed description of substitutions and preferred embodiments

SEQ ID NO: 197 - DNA, 60 bp, Artificial Sequence; identical to SEQ ID NO: 25
  Description of Artificial Sequence: Synthetic oligonucleotide
  modified_base (19)..(36): a, c, g, t, unknown or other and this region contains Tyr, Ser, Gly, Arg, Asp, Glu, Phe, His, Ile, Lys, Leu, Met, Asn, Gln, Thr, Val, Trp, Pro or Ala-enconding codons
  see specification as filed for detailed description of substitutions and preferred embodiments

SEQ ID NO: 198 - DNA, 63 bp, Artificial Sequence; identical to SEQ ID NO: 26
  Description of Artificial Sequence: Synthetic oligonucleotide
  modified_base (19)..(39): a, c, g, t, unknown or other and this region contains Tyr, Ser, Gly, Arg, Asp, Glu, Phe, His, Ile, Lys, Leu, Met, Asn, Gln, Thr, Val, Trp, Pro or Ala-enconding codons
  see specification as filed for detailed description of substitutions and preferred embodiments

SEQ ID NO: 199 - DNA, 66 bp, Artificial Sequence; identical to SEQ ID NO: 27
  Description of Artificial Sequence: Synthetic oligonucleotide
  modified_base (19)..(42): a, c, g, t, unknown or other and this region contains Tyr, Ser, Gly, Arg, Asp, Glu, Phe, His, Ile, Lys, Leu, Met, Asn, Gln, Thr, Val, Trp, Pro or Ala-enconding codons
  see specification as filed for detailed description of substitutions and preferred embodiments

SEQ ID NO: 200 - DNA, 69 bp, Artificial Sequence; identical to SEQ ID NO: 28
  Description of Artificial Sequence: Synthetic oligonucleotide
  modified_base (19)..(45): a, c, g, t, unknown or other and this region contains Tyr, Ser, Gly, Arg, Asp, Glu, Phe, His, Ile, Lys, Leu, Met, Asn, Gln, Thr, Val, Trp, Pro or Ala-enconding codons
  see specification as filed for detailed description of substitutions and preferred embodiments

SEQ ID NO: 201 - DNA, 72 bp, Artificial Sequence; identical to SEQ ID NO: 29
  Description of Artificial Sequence: Synthetic oligonucleotide
  modified_base (19)..(48): a, c, g, t, unknown or other and this region contains Tyr, Ser, Gly, Arg, Asp, Glu, Phe, His, Ile, Lys, Leu, Met, Asn, Gln, Thr, Val, Trp, Pro or Ala-enconding codons
  see specification as filed for detailed description of substitutions and preferred embodiments

SEQ ID NO: 202 - DNA, 75 bp, Artificial Sequence; identical to SEQ ID NO: 30
  Description of Artificial Sequence: Synthetic oligonucleotide
  modified_base (19)..(51): a, c, g, t, unknown or other and this region contains Tyr, Ser, Gly, Arg, Asp, Glu, Phe, His, Ile, Lys, Leu, Met, Asn, Gln, Thr, Val, Trp, Pro or Ala-enconding codons
  see specification as filed for detailed description of substitutions and preferred embodiments

SEQ ID NO: 203 - DNA, 78 bp, Artificial Sequence; identical to SEQ ID NO: 31
  Description of Artificial Sequence: Synthetic oligonucleotide
  modified_base (19)..(54): a, c, g, t, unknown or other and this region contains Tyr, Ser, Gly, Arg, Asp, Glu, Phe, His, Ile, Lys, Leu, Met, Asn, Gln, Thr, Val, Trp, Pro or Ala-enconding codons
  see specification as filed for detailed description of substitutions and preferred embodiments

SEQ ID NO: 204 - DNA, 81 bp, Artificial Sequence; identical to SEQ ID NO: 32
  Description of Artificial Sequence: Synthetic oligonucleotide
  modified_base (19)..(57): a, c, g, t, unknown or other and this region contains Tyr, Ser, Gly, Arg, Asp, Glu, Phe, His, Ile, Lys, Leu, Met, Asn, Gln, Thr, Val, Trp, Pro or Ala-enconding codons
  see specification as filed for detailed description of substitutions and preferred embodiments

SEQ ID NO: 205 - DNA, 84 bp, Artificial Sequence; identical to SEQ ID NO: 33
  Description of Artificial Sequence: Synthetic oligonucleotide
  modified_base (19)..(60): a, c, g, t, unknown or other and this region contains Tyr, Ser, Gly, Arg, Asp, Glu, Phe, His, Ile, Lys, Leu, Met, Asn, Gln, Thr, Val, Trp, Pro or Ala-enconding codons
  see specification as filed for detailed description of substitutions and preferred embodiments

SEQ ID NO: 206 - DNA, 87 bp, Artificial Sequence; identical to SEQ ID NO: 34
  Description of Artificial Sequence: Synthetic oligonucleotide
  modified_base (19)..(63): a, c, g, t, unknown or other and this region contains Tyr, Ser, Gly, Arg, Asp, Glu, Phe, His, Ile, Lys, Leu, Met, Asn, Gln, Thr, Val, Trp, Pro or Ala-enconding codons
  see specification as filed for detailed description of substitutions and preferred embodiments

SEQ ID NO: 207 - DNA, 90 bp, Artificial Sequence; identical to SEQ ID NO: 35
  Description of Artificial Sequence: Synthetic oligonucleotide
  modified_base (19)..(66): a, c, g, t, unknown or other and this region contains Tyr, Ser, Gly, Arg, Asp, Glu, Phe, His, Ile, Lys, Leu, Met, Asn, Gln, Thr, Val, Trp, Pro or Ala-enconding codons
  see specification as filed for detailed description of substitutions and preferred embodiments

SEQ ID NO: 208 - DNA, 93 bp, Artificial Sequence; identical to SEQ ID NO: 36
  Description of Artificial Sequence: Synthetic oligonucleotide
  modified_base (19)..(69): a, c, g, t, unknown or other and this region contains Tyr, Ser, Gly, Arg, Asp, Glu, Phe, His, Ile, Lys, Leu, Met, Asn, Gln, Thr, Val, Trp, Pro or Ala-enconding codons
  see specification as filed for detailed description of substitutions and preferred embodiments

SEQ ID NO: 209 - protein, 9 aa, Artificial Sequence
  Description of Artificial Sequence: Synthetic peptide
QQSSSSPYT

SEQ ID NO: 210 - protein, 9 aa, Artificial Sequence
  Description of Artificial Sequence: Synthetic peptide
QQSYSYPST

SEQ ID NO: 211 - protein, 9 aa, Artificial Sequence
  Description of Artificial Sequence: Synthetic peptide
QQSSYYPST

SEQ ID NO: 212 - protein, 9 aa, Artificial Sequence
  Description of Artificial Sequence: Synthetic peptide
QQSSSYPYT

SEQ ID NO: 213 - protein, 9 aa, Artificial Sequence
  Description of Artificial Sequence: Synthetic peptide
QQSYYYPST

SEQ ID NO: 214 - protein, 9 aa, Artificial Sequence
  Description of Artificial Sequence: Synthetic peptide
QQSSSYPST

SEQ ID NO: 215 - protein, 9 aa, Artificial Sequence
  Description of Artificial Sequence: Synthetic peptide
QQSYYSPST

SEQ ID NO: 216 - protein, 9 aa, Artificial Sequence
  Description of Artificial Sequence: Synthetic peptide
QQSYSSPST

SEQ ID NO: 217 - protein, 9 aa, Artificial Sequence
  Description of Artificial Sequence: Synthetic peptide
QQSSYYPST

SEQ ID NO: 218 - protein, 9 aa, Artificial Sequence
  Description of Artificial Sequence: Synthetic peptide
QQSYSSPST

SEQ ID NO: 219 - protein, 9 aa, Artificial Sequence
  Description of Artificial Sequence: Synthetic peptide
QQSSSSPST

SEQ ID NO: 220 - protein, 9 aa, Artificial Sequence
  Description of Artificial Sequence: Synthetic peptide
QQSYSYPST

SEQ ID NO: 221 - protein, 9 aa, Artificial Sequence
  Description of Artificial Sequence: Synthetic peptide
QQSYSYPST

SEQ ID NO: 222 - protein, 9 aa, Artificial Sequence
  Description of Artificial Sequence: Synthetic peptide
QQSYYSPYT

SEQ ID NO: 223 - protein, 9 aa, Artificial Sequence
  Description of Artificial Sequence: Synthetic peptide
QQYSSYPST

SEQ ID NO: 224 - protein, 9 aa, Artificial Sequence
  Description of Artificial Sequence: Synthetic peptide
QQYSSSPYT

SEQ ID NO: 225 - protein, 9 aa, Artificial Sequence
  Description of Artificial Sequence: Synthetic peptide
QQYSSYPST

SEQ ID NO: 226 - protein, 9 aa, Artificial Sequence
  Description of Artificial Sequence: Synthetic peptide
QQYSSSPYT

SEQ ID NO: 227 - protein, 9 aa, Artificial Sequence
  Description of Artificial Sequence: Synthetic peptide
QQSSSSPYT

SEQ ID NO: 228 - protein, 9 aa, Artificial Sequence
  Description of Artificial Sequence: Synthetic peptide
QQSSYYPST

SEQ ID NO: 229 - protein, 9 aa, Artificial Sequence
  Description of Artificial Sequence: Synthetic peptide
QQSYSYPST

SEQ ID NO: 230 - protein, 9 aa, Artificial Sequence
  Description of Artificial Sequence: Synthetic peptide
QQSSYSPST

SEQ ID NO: 231 - protein, 9 aa, Artificial Sequence
  Description of Artificial Sequence: Synthetic peptide
QQSYYSPST

SEQ ID NO: 232 - protein, 9 aa, Artificial Sequence
  Description of Artificial Sequence: Synthetic peptide
QQSYYSPST

SEQ ID NO: 233 - protein, 9 aa, Artificial Sequence
  Description of Artificial Sequence: Synthetic peptide
QQYYSSPYT

SEQ ID NO: 234 - protein, 9 aa, Artificial Sequence
  Description of Artificial Sequence: Synthetic peptide
QQSYSSPST

SEQ ID NO: 235 - protein, 9 aa, Artificial Sequence
  Description of Artificial Sequence: Synthetic peptide
QQSYSYPST

SEQ ID NO: 236 - protein, 9 aa, Artificial Sequence
  Description of Artificial Sequence: Synthetic peptide
QQSSSYPST

SEQ ID NO: 237 - protein, 9 aa, Artificial Sequence
  Description of Artificial Sequence: Synthetic peptide
QQSYSYPST

SEQ ID NO: 238 - protein, 9 aa, Artificial Sequence
  Description of Artificial Sequence: Synthetic peptide
QQYYSYPST

SEQ ID NO: 239 - protein, 9 aa, Artificial Sequence
  Description of Artificial Sequence: Synthetic peptide
QQSSYSPYT

SEQ ID NO: 240 - protein, 9 aa, Artificial Sequence
  Description of Artificial Sequence: Synthetic peptide
QQSSSYPST

SEQ ID NO: 241 - protein, 9 aa, Artificial Sequence
  Description of Artificial Sequence: Synthetic peptide
QQSSYYPST

SEQ ID NO: 242 - protein, 9 aa, Artificial Sequence
  Description of Artificial Sequence: Synthetic peptide
QQSYSYPST

SEQ ID NO: 243 - protein, 9 aa, Artificial Sequence
  Description of Artificial Sequence: Synthetic peptide
QQSYYYPST

SEQ ID NO: 244 - protein, 9 aa, Artificial Sequence
  Description of Artificial Sequence: Synthetic peptide
QQSYYYPST

SEQ ID NO: 245 - protein, 9 aa, Artificial Sequence
  Description of Artificial Sequence: Synthetic peptide
QQSSSSPYT

SEQ ID NO: 246 - protein, 9 aa, Artificial Sequence
  Description of Artificial Sequence: Synthetic peptide
QQSYSYPST

SEQ ID NO: 247 - protein, 9 aa, Artificial Sequence
  Description of Artificial Sequence: Synthetic peptide
QQSYYSPYT

SEQ ID NO: 248 - protein, 9 aa, Artificial Sequence
  Description of Artificial Sequence: Synthetic peptide
QQSYYSPST

SEQ ID NO: 249 - protein, 9 aa, Artificial Sequence
  Description of Artificial Sequence: Synthetic peptide
QQSYSSPYT

SEQ ID NO: 250 - protein, 9 aa, Artificial Sequence
  Description of Artificial Sequence: Synthetic peptide
QQSYYSPST

SEQ ID NO: 251 - protein, 9 aa, Artificial Sequence
  Description of Artificial Sequence: Synthetic peptide
QQSSYYPST

SEQ ID NO: 252 - protein, 9 aa, Artificial Sequence
  Description of Artificial Sequence: Synthetic peptide
QQSYYYPST

SEQ ID NO: 253 - protein, 9 aa, Artificial Sequence
  Description of Artificial Sequence: Synthetic peptide
QQSYSYPST

SEQ ID NO: 254 - protein, 9 aa, Artificial Sequence
  Description of Artificial Sequence: Synthetic peptide
QQSSSSPYT

SEQ ID NO: 255 - protein, 9 aa, Artificial Sequence
  Description of Artificial Sequence: Synthetic peptide
QQSSSSPYT

SEQ ID NO: 256 - protein, 9 aa, Artificial Sequence
  Description of Artificial Sequence: Synthetic peptide
QQSSSSPYT

SEQ ID NO: 257 - protein, 9 aa, Artificial Sequence
  Description of Artificial Sequence: Synthetic peptide
QQYSYSPYT

SEQ ID NO: 258 - protein, 9 aa, Artificial Sequence
  Description of Artificial Sequence: Synthetic peptide
QQYSYSPST

SEQ ID NO: 259 - protein, 9 aa, Artificial Sequence
  Description of Artificial Sequence: Synthetic peptide
QQSSYYPST

SEQ ID NO: 260 - protein, 9 aa, Artificial Sequence
  Description of Artificial Sequence: Synthetic peptide
QQSSSSPYT

SEQ ID NO: 261 - protein, 9 aa, Artificial Sequence
  Description of Artificial Sequence: Synthetic peptide
QQYSSSPYT

SEQ ID NO: 262 - protein, 9 aa, Artificial Sequence
  Description of Artificial Sequence: Synthetic peptide
QQYYYSPST

SEQ ID NO: 263 - protein, 9 aa, Artificial Sequence
  Description of Artificial Sequence: Synthetic peptide
QQSYSSPST

SEQ ID NO: 264 - protein, 9 aa, Artificial Sequence
  Description of Artificial Sequence: Synthetic peptide
QQSYSSPST

SEQ ID NO: 265 - protein, 9 aa, Artificial Sequence
  Description of Artificial Sequence: Synthetic peptide
QQYYYSPST

SEQ ID NO: 266 - protein, 9 aa, Artificial Sequence
  Description of Artificial Sequence: Synthetic peptide
QQSYSSPST

SEQ ID NO: 267 - protein, 9 aa, Artificial Sequence
  Description of Artificial Sequence: Synthetic peptide
QQSYSSPST

SEQ ID NO: 268 - protein, 9 aa, Artificial Sequence
  Description of Artificial Sequence: Synthetic peptide
QQSYSSPST

SEQ ID NO: 269 - protein, 9 aa, Artificial Sequence
  Description of Artificial Sequence: Synthetic peptide
QQSSYYPST

SEQ ID NO: 270 - protein, 9 aa, Artificial Sequence
  Description of Artificial Sequence: Synthetic peptide
QQSYSSPST

SEQ ID NO: 271 - protein, 9 aa, Artificial Sequence
  Description of Artificial Sequence: Synthetic peptide
QQYSSSPYT

SEQ ID NO: 272 - protein, 9 aa, Artificial Sequence
  Description of Artificial Sequence: Synthetic peptide
QQYYSYPST

SEQ ID NO: 273 - protein, 9 aa, Artificial Sequence
  Description of Artificial Sequence: Synthetic peptide
QQSYSYPST

SEQ ID NO: 274 - protein, 9 aa, Artificial Sequence
  Description of Artificial Sequence: Synthetic peptide
QQSYYSPST

SEQ ID NO: 275 - protein, 9 aa, Artificial Sequence
  Description of Artificial Sequence: Synthetic peptide
QQSYSSPST

SEQ ID NO: 276 - protein, 9 aa, Artificial Sequence
  Description of Artificial Sequence: Synthetic peptide
QQSYSYPST

SEQ ID NO: 277 - protein, 9 aa, Artificial Sequence
  Description of Artificial Sequence: Synthetic peptide
QQSSSSPYT

SEQ ID NO: 278 - protein, 9 aa, Artificial Sequence
  Description of Artificial Sequence: Synthetic peptide
QQSYSSPST

SEQ ID NO: 279 - protein, 9 aa, Artificial Sequence
  Description of Artificial Sequence: Synthetic peptide
QQYSYYPST

SEQ ID NO: 280 - protein, 9 aa, Artificial Sequence
  Description of Artificial Sequence: Synthetic peptide
QQSSYSPST

SEQ ID NO: 281 - protein, 9 aa, Artificial Sequence
  Description of Artificial Sequence: Synthetic peptide
QQSYYSPYT

SEQ ID NO: 282 - protein, 9 aa, Artificial Sequence
  Description of Artificial Sequence: Synthetic peptide
QQSYYSPYT

SEQ ID NO: 283 - protein, 9 aa, Artificial Sequence
  Description of Artificial Sequence: Synthetic peptide
QQSYSSPST

SEQ ID NO: 284 - protein, 9 aa, Artificial Sequence
  Description of Artificial Sequence: Synthetic peptide
QQYSYSPST

SEQ ID NO: 285 - protein, 9 aa, Artificial Sequence
  Description of Artificial Sequence: Synthetic peptide
QQYSSSPYT

SEQ ID NO: 286 - protein, 9 aa, Artificial Sequence
  Description of Artificial Sequence: Synthetic peptide
QQYSYSPYT

SEQ ID NO: 287 - protein, 9 aa, Artificial Sequence
  Description of Artificial Sequence: Synthetic peptide
QQSYYYPST

SEQ ID NO: 288 - protein, 9 aa, Artificial Sequence
  Description of Artificial Sequence: Synthetic peptide
QQSYSYPST

SEQ ID NO: 289 - protein, 9 aa, Artificial Sequence
  Description of Artificial Sequence: Synthetic peptide
QQYYSYPST

SEQ ID NO: 290 - protein, 9 aa, Artificial Sequence
  Description of Artificial Sequence: Synthetic peptide
QQSYYSPST

SEQ ID NO: 291 - protein, 9 aa, Artificial Sequence
  Description of Artificial Sequence: Synthetic peptide
QQSYYSPST

SEQ ID NO: 292 - protein, 9 aa, Artificial Sequence
  Description of Artificial Sequence: Synthetic peptide
QQSSSSPST

SEQ ID NO: 293 - protein, 9 aa, Artificial Sequence
  Description of Artificial Sequence: Synthetic peptide
QQSSYSPST

SEQ ID NO: 294 - protein, 9 aa, Artificial Sequence
  Description of Artificial Sequence: Synthetic peptide
QQSSSSPST

SEQ ID NO: 295 - protein, 9 aa, Artificial Sequence
  Description of Artificial Sequence: Synthetic peptide
QQSSSSPST

SEQ ID NO: 296 - protein, 9 aa, Artificial Sequence
  Description of Artificial Sequence: Synthetic peptide
QQSYYSPST

SEQ ID NO: 297 - protein, 9 aa, Artificial Sequence
  Description of Artificial Sequence: Synthetic peptide
QQYSYYPST

SEQ ID NO: 298 - protein, 9 aa, Artificial Sequence
  Description of Artificial Sequence: Synthetic peptide
QQSYSSPST

SEQ ID NO: 299 - protein, 9 aa, Artificial Sequence
  Description of Artificial Sequence: Synthetic peptide
QQSYSYPST

SEQ ID NO: 300 - protein, 9 aa, Artificial Sequence
  Description of Artificial Sequence: Synthetic peptide
QQSSSSPYT

SEQ ID NO: 301 - protein, 9 aa, Artificial Sequence
  Description of Artificial Sequence: Synthetic peptide
QQSSYYPST

SEQ ID NO: 302 - protein, 9 aa, Artificial Sequence
  Description of Artificial Sequence: Synthetic peptide
QQSYSSPST

SEQ ID NO: 303 - protein, 9 aa, Artificial Sequence
  Description of Artificial Sequence: Synthetic peptide
QQYYYSPYT

SEQ ID NO: 304 - protein, 9 aa, Artificial Sequence
  Description of Artificial Sequence: Synthetic peptide
QQSSSSPST

SEQ ID NO: 305 - protein, 9 aa, Artificial Sequence
  Description of Artificial Sequence: Synthetic peptide
QQYYSSPYT

SEQ ID NO: 306 - protein, 9 aa, Artificial Sequence
  Description of Artificial Sequence: Synthetic peptide
QQSYSYPST

SEQ ID NO: 307 - protein, 9 aa, Artificial Sequence
  Description of Artificial Sequence: Synthetic peptide
QQSYSSPST

SEQ ID NO: 308 - protein, 9 aa, Artificial Sequence
  Description of Artificial Sequence: Synthetic peptide
QQYSYSPYT

SEQ ID NO: 309 - protein, 9 aa, Artificial Sequence
  Description of Artificial Sequence: Synthetic peptide
QQYYSYPYT

SEQ ID NO: 310 - protein, 9 aa, Artificial Sequence
  Description of Artificial Sequence: Synthetic peptide
QQSYSYPST

SEQ ID NO: 311 - protein, 9 aa, Artificial Sequence
  Description of Artificial Sequence: Synthetic peptide
QQYSYSPST

SEQ ID NO: 312 - protein, 9 aa, Artificial Sequence
  Description of Artificial Sequence: Synthetic peptide
QQSYSYPST

SEQ ID NO: 313 - protein, 9 aa, Artificial Sequence
  Description of Artificial Sequence: Synthetic peptide
QQSSYSPST

SEQ ID NO: 314 - protein, 9 aa, Artificial Sequence
  Description of Artificial Sequence: Synthetic peptide
QQSSYYPST

SEQ ID NO: 315 - protein, 9 aa, Artificial Sequence
  Description of Artificial Sequence: Synthetic peptide
QQSYSSPST

SEQ ID NO: 316 - protein, 9 aa, Artificial Sequence
  Description of Artificial Sequence: Synthetic peptide
QQSSSSPYT

SEQ ID NO: 317 - protein, 9 aa, Artificial Sequence
  Description of Artificial Sequence: Synthetic peptide
QQYYYSPST

SEQ ID NO: 318 - protein, 10 aa, Artificial Sequence
  Description of Artificial Sequence: Synthetic peptide
GFSIYSYSIH

SEQ ID NO: 319 - protein, 10 aa, Artificial Sequence
  Description of Artificial Sequence: Synthetic peptide
GFYIYSYSIH

SEQ ID NO: 320 - protein, 10 aa, Artificial Sequence
  Description of Artificial Sequence: Synthetic peptide
GFSISYYSIH

SEQ ID NO: 321 - protein, 10 aa, Artificial Sequence
  Description of Artificial Sequence: Synthetic peptide
GFYIYSYSIH

SEQ ID NO: 322 - protein, 10 aa, Artificial Sequence
  Description of Artificial Sequence: Synthetic peptide
GFYIYSYSIH

SEQ ID NO: 323 - protein, 10 aa, Artificial Sequence
  Description of Artificial Sequence: Synthetic peptide
GFYIYSYSIH

SEQ ID NO: 324 - protein, 10 aa, Artificial Sequence
  Description of Artificial Sequence: Synthetic peptide
GFYIYSYSIH

SEQ ID NO: 325 - protein, 10 aa, Artificial Sequence
  Description of Artificial Sequence: Synthetic peptide
GFSISYYSIH

SEQ ID NO: 326 - protein, 10 aa, Artificial Sequence
  Description of Artificial Sequence: Synthetic peptide
GFSIYSSSIH

SEQ ID NO: 327 - protein, 10 aa, Artificial Sequence
  Description of Artificial Sequence: Synthetic peptide
GFSISYYSIH

SEQ ID NO: 328 - protein, 10 aa, Artificial Sequence
  Description of Artificial Sequence: Synthetic peptide
GFSISYYSIH

SEQ ID NO: 329 - protein, 10 aa, Artificial Sequence
  Description of Artificial Sequence: Synthetic peptide
GFSIYSYSIH

SEQ ID NO: 330 - protein, 10 aa, Artificial Sequence
  Description of Artificial Sequence: Synthetic peptide
GFSIYYYSIH

SEQ ID NO: 331 - protein, 10 aa, Artificial Sequence
  Description of Artificial Sequence: Synthetic peptide
GFSISYSSIH

SEQ ID NO: 332 - protein, 10 aa, Artificial Sequence
  Description of Artificial Sequence: Synthetic peptide
GFSIYSYSIH

SEQ ID NO: 333 - protein, 10 aa, Artificial Sequence
  Description of Artificial Sequence: Synthetic peptide
GFYIYSYSIH

SEQ ID NO: 334 - protein, 10 aa, Artificial Sequence
  Description of Artificial Sequence: Synthetic peptide
GFSIYSYSIH

SEQ ID NO: 335 - protein, 10 aa, Artificial Sequence
  Description of Artificial Sequence: Synthetic peptide
GFSIYSYSIH

SEQ ID NO: 336 - protein, 10 aa, Artificial Sequence
  Description of Artificial Sequence: Synthetic peptide
GFYIYSYSIH

SEQ ID NO: 337 - protein, 10 aa, Artificial Sequence
  Description of Artificial Sequence: Synthetic peptide
GFYIYSYSIH

SEQ ID NO: 338 - protein, 10 aa, Artificial Sequence
  Description of Artificial Sequence: Synthetic peptide
GFYISYYSIH

SEQ ID NO: 339 - protein, 10 aa, Artificial Sequence
  Description of Artificial Sequence: Synthetic peptide
GFSISYYSIH

SEQ ID NO: 340 - protein, 10 aa, Artificial Sequence
  Description of Artificial Sequence: Synthetic peptide
GFSIYSYSIH

SEQ ID NO: 341 - protein, 10 aa, Artificial Sequence
  Description of Artificial Sequence: Synthetic peptide
GFSISSYSIH

SEQ ID NO: 342 - protein, 10 aa, Artificial Sequence
  Description of Artificial Sequence: Synthetic peptide
GFSISYYSIH

SEQ ID NO: 343 - protein, 10 aa, Artificial Sequence
  Description of Artificial Sequence: Synthetic peptide
GFSIYSYSIH

SEQ ID NO: 344 - protein, 10 aa, Artificial Sequence
  Description of Artificial Sequence: Synthetic peptide
GFSIYSYSIH

SEQ ID NO: 345 - protein, 10 aa, Artificial Sequence
  Description of Artificial Sequence: Synthetic peptide
GFYISYYSIH

SEQ ID NO: 346 - protein, 10 aa, Artificial Sequence
  Description of Artificial Sequence: Synthetic peptide
GFSIYSYSIH

SEQ ID NO: 347 - protein, 10 aa, Artificial Sequence
  Description of Artificial Sequence: Synthetic peptide
GFYIYSYSIH

SEQ ID NO: 348 - protein, 10 aa, Artificial Sequence
  Description of Artificial Sequence: Synthetic peptide
GFSIYSYSIH

SEQ ID NO: 349 - protein, 10 aa, Artificial Sequence
  Description of Artificial Sequence: Synthetic peptide
GFSIYSYSIH

SEQ ID NO: 350 - protein, 10 aa, Artificial Sequence
  Description of Artificial Sequence: Synthetic peptide
GFYIYSYSIH

SEQ ID NO: 351 - protein, 10 aa, Artificial Sequence
  Description of Artificial Sequence: Synthetic peptide
GFSISYYSIH

SEQ ID NO: 352 - protein, 10 aa, Artificial Sequence
  Description of Artificial Sequence: Synthetic peptide
GFYIYSYSIH

SEQ ID NO: 353 - protein, 10 aa, Artificial Sequence
  Description of Artificial Sequence: Synthetic peptide
GFSIYSYSIH

SEQ ID NO: 354 - protein, 10 aa, Artificial Sequence
  Description of Artificial Sequence: Synthetic peptide
GFYIYSYSIH

SEQ ID NO: 355 - protein, 10 aa, Artificial Sequence
  Description of Artificial Sequence: Synthetic peptide
GFSIYSYSIH

SEQ ID NO: 356 - protein, 10 aa, Artificial Sequence
  Description of Artificial Sequence: Synthetic peptide
GFSIYSYSIH

SEQ ID NO: 357 - protein, 10 aa, Artificial Sequence
  Description of Artificial Sequence: Synthetic peptide
GFYIYSYSIH

SEQ ID NO: 358 - protein, 10 aa, Artificial Sequence
  Description of Artificial Sequence: Synthetic peptide
GFSISYSYIH

SEQ ID NO: 359 - protein, 10 aa, Artificial Sequence
  Description of Artificial Sequence: Synthetic peptide
GFSISYSSIH

SEQ ID NO: 360 - protein, 10 aa, Artificial Sequence
  Description of Artificial Sequence: Synthetic peptide
GFSISYYSIH

SEQ ID NO: 361 - protein, 10 aa, Artificial Sequence
  Description of Artificial Sequence: Synthetic peptide
GFSISYSSIH

SEQ ID NO: 362 - protein, 10 aa, Artificial Sequence
  Description of Artificial Sequence: Synthetic peptide
GFYIYSYSIH

SEQ ID NO: 363 - protein, 10 aa, Artificial Sequence
  Description of Artificial Sequence: Synthetic peptide
GFSISYYSIH

SEQ ID NO: 364 - protein, 10 aa, Artificial Sequence
  Description of Artificial Sequence: Synthetic peptide
GFSIYSSSIH

SEQ ID NO: 365 - protein, 10 aa, Artificial Sequence
  Description of Artificial Sequence: Synthetic peptide
GFSISYSSIH

SEQ ID NO: 366 - protein, 10 aa, Artificial Sequence
  Description of Artificial Sequence: Synthetic peptide
GFSIYSYSIH

SEQ ID NO: 367 - protein, 10 aa, Artificial Sequence
  Description of Artificial Sequence: Synthetic peptide
GFSISYYSIH

SEQ ID NO: 368 - protein, 10 aa, Artificial Sequence
  Description of Artificial Sequence: Synthetic peptide
GFSISYSSIH

SEQ ID NO: 369 - protein, 10 aa, Artificial Sequence
  Description of Artificial Sequence: Synthetic peptide
GFYISYSSIH

SEQ ID NO: 370 - protein, 10 aa, Artificial Sequence
  Description of Artificial Sequence: Synthetic peptide
GFYISYSSIH

SEQ ID NO: 371 - protein, 10 aa, Artificial Sequence
  Description of Artificial Sequence: Synthetic peptide
GFSIYYSSIH

SEQ ID NO: 372 - protein, 10 aa, Artificial Sequence
  Description of Artificial Sequence: Synthetic peptide
GFSIYYSSIH

SEQ ID NO: 373 - protein, 10 aa, Artificial Sequence
  Description of Artificial Sequence: Synthetic peptide
GFSISYSSIH

SEQ ID NO: 374 - protein, 10 aa, Artificial Sequence
  Description of Artificial Sequence: Synthetic peptide
GFYISYYSIH

SEQ ID NO: 375 - protein, 10 aa, Artificial Sequence
  Description of Artificial Sequence: Synthetic peptide
GFSISYYSIH

SEQ ID NO: 376 - protein, 10 aa, Artificial Sequence
  Description of Artificial Sequence: Synthetic peptide
GFYIYYYSIH

SEQ ID NO: 377 - protein, 10 aa, Artificial Sequence
  Description of Artificial Sequence: Synthetic peptide
GFYISYYSIH

SEQ ID NO: 378 - protein, 10 aa, Artificial Sequence
  Description of Artificial Sequence: Synthetic peptide
GFYIYSSSIH

SEQ ID NO: 379 - protein, 10 aa, Artificial Sequence
  Description of Artificial Sequence: Synthetic peptide
GFSISSSSIH

SEQ ID NO: 380 - protein, 10 aa, Artificial Sequence
  Description of Artificial Sequence: Synthetic peptide
GFSISSSSIH

SEQ ID NO: 381 - protein, 10 aa, Artificial Sequence
  Description of Artificial Sequence: Synthetic peptide
GFSIYSSSIH

SEQ ID NO: 382 - protein, 10 aa, Artificial Sequence
  Description of Artificial Sequence: Synthetic peptide
GFSISYYSIH

SEQ ID NO: 383 - protein, 10 aa, Artificial Sequence
  Description of Artificial Sequence: Synthetic peptide
GFYISSSYIH

SEQ ID NO: 384 - protein, 10 aa, Artificial Sequence
  Description of Artificial Sequence: Synthetic peptide
GFSIYSSSIH

SEQ ID NO: 385 - protein, 10 aa, Artificial Sequence
  Description of Artificial Sequence: Synthetic peptide
GFSISYYSIH

SEQ ID NO: 386 - protein, 10 aa, Artificial Sequence
  Description of Artificial Sequence: Synthetic peptide
GFSISYYSIH

SEQ ID NO: 387 - protein, 10 aa, Artificial Sequence
  Description of Artificial Sequence: Synthetic peptide
GFYIYSYSIH

SEQ ID NO: 388 - protein, 10 aa, Artificial Sequence
  Description of Artificial Sequence: Synthetic peptide
GFSIYYYSIH

SEQ ID NO: 389 - protein, 10 aa, Artificial Sequence
  Description of Artificial Sequence: Synthetic peptide
GFSIYYYSIH

SEQ ID NO: 390 - protein, 10 aa, Artificial Sequence
  Description of Artificial Sequence: Synthetic peptide
GFYIYSYSIH

SEQ ID NO: 391 - protein, 10 aa, Artificial Sequence
  Description of Artificial Sequence: Synthetic peptide
GFSISYYSIH

SEQ ID NO: 392 - protein, 10 aa, Artificial Sequence
  Description of Artificial Sequence: Synthetic peptide
GFSISSYYIH

SEQ ID NO: 393 - protein, 10 aa, Artificial Sequence
  Description of Artificial Sequence: Synthetic peptide
GFSISYYSIH

SEQ ID NO: 394 - protein, 10 aa, Artificial Sequence
  Description of Artificial Sequence: Synthetic peptide
GFSIYSYSIH

SEQ ID NO: 395 - protein, 10 aa, Artificial Sequence
  Description of Artificial Sequence: Synthetic peptide
GFYIYYYSIH

SEQ ID NO: 396 - protein, 10 aa, Artificial Sequence
  Description of Artificial Sequence: Synthetic peptide
GFSIYYYSIH

SEQ ID NO: 397 - protein, 10 aa, Artificial Sequence
  Description of Artificial Sequence: Synthetic peptide
GFSISSSSIH

SEQ ID NO: 398 - protein, 10 aa, Artificial Sequence
  Description of Artificial Sequence: Synthetic peptide
GFSISYSSIH

SEQ ID NO: 399 - protein, 10 aa, Artificial Sequence
  Description of Artificial Sequence: Synthetic peptide
GFSISYYSIH

SEQ ID NO: 400 - protein, 10 aa, Artificial Sequence
  Description of Artificial Sequence: Synthetic peptide
GFSISYYSIH

SEQ ID NO: 401 - protein, 10 aa, Artificial Sequence
  Description of Artificial Sequence: Synthetic peptide
GFSIYYSSIH

SEQ ID NO: 402 - protein, 10 aa, Artificial Sequence
  Description of Artificial Sequence: Synthetic peptide
GFSIYYSSIH

SEQ ID NO: 403 - protein, 10 aa, Artificial Sequence
  Description of Artificial Sequence: Synthetic peptide
GFSIYYSSIH

SEQ ID NO: 404 - protein, 10 aa, Artificial Sequence
  Description of Artificial Sequence: Synthetic peptide
GFSIYSYSIH

SEQ ID NO: 405 - protein, 10 aa, Artificial Sequence
  Description of Artificial Sequence: Synthetic peptide
GFSIYSYSIH

SEQ ID NO: 406 - protein, 10 aa, Artificial Sequence
  Description of Artificial Sequence: Synthetic peptide
GFSIYSYSIH

SEQ ID NO: 407 - protein, 10 aa, Artificial Sequence
  Description of Artificial Sequence: Synthetic peptide
GFSIYSYSIH

SEQ ID NO: 408 - protein, 10 aa, Artificial Sequence
  Description of Artificial Sequence: Synthetic peptide
GFSIYSYSIH

SEQ ID NO: 409 - protein, 10 aa, Artificial Sequence
  Description of Artificial Sequence: Synthetic peptide
GFYIYSYSIH

SEQ ID NO: 410 - protein, 10 aa, Artificial Sequence
  Description of Artificial Sequence: Synthetic peptide
GFSIYYYSIH

SEQ ID NO: 411 - protein, 10 aa, Artificial Sequence
  Description of Artificial Sequence: Synthetic peptide
GFSISYYSIH

SEQ ID NO: 412 - protein, 10 aa, Artificial Sequence
  Description of Artificial Sequence: Synthetic peptide
GFSIYSYSIH

SEQ ID NO: 413 - protein, 10 aa, Artificial Sequence
  Description of Artificial Sequence: Synthetic peptide
GFSISYYSIH

SEQ ID NO: 414 - protein, 10 aa, Artificial Sequence
  Description of Artificial Sequence: Synthetic peptide
GFSIYSYSIH

SEQ ID NO: 415 - protein, 10 aa, Artificial Sequence
  Description of Artificial Sequence: Synthetic peptide
GFYIYSYSIH

SEQ ID NO: 416 - protein, 10 aa, Artificial Sequence
  Description of Artificial Sequence: Synthetic peptide
GFYIYSYSIH

SEQ ID NO: 417 - protein, 10 aa, Artificial Sequence
  Description of Artificial Sequence: Synthetic peptide
GFYISYSSIH

SEQ ID NO: 418 - protein, 10 aa, Artificial Sequence
  Description of Artificial Sequence: Synthetic peptide
GFYIYYSYIH

SEQ ID NO: 419 - protein, 10 aa, Artificial Sequence
  Description of Artificial Sequence: Synthetic peptide
GFSISYSSIH

SEQ ID NO: 420 - protein, 10 aa, Artificial Sequence
  Description of Artificial Sequence: Synthetic peptide
GFYIYYSSIH

SEQ ID NO: 421 - protein, 10 aa, Artificial Sequence
  Description of Artificial Sequence: Synthetic peptide
GFSISYYSIH

SEQ ID NO: 422 - protein, 10 aa, Artificial Sequence
  Description of Artificial Sequence: Synthetic peptide
GFYIYYYSIH

SEQ ID NO: 423 - protein, 10 aa, Artificial Sequence
  Description of Artificial Sequence: Synthetic peptide
GFYIYYYSIH

SEQ ID NO: 424 - protein, 10 aa, Artificial Sequence
  Description of Artificial Sequence: Synthetic peptide
GFYISYYSIH

SEQ ID NO: 425 - protein, 10 aa, Artificial Sequence
  Description of Artificial Sequence: Synthetic peptide
GFSIYSSSIH

SEQ ID NO: 426 - protein, 10 aa, Artificial Sequence
  Description of Artificial Sequence: Synthetic peptide
GFSIYSSSIH

SEQ ID NO: 427 - protein, 10 aa, Artificial Sequence
  Description of Artificial Sequence: Synthetic peptide
GFYIYYYSIH

SEQ ID NO: 428 - protein, 10 aa, Artificial Sequence
  Description of Artificial Sequence: Synthetic peptide
GFYISYYSIH

SEQ ID NO: 429 - protein, 10 aa, Artificial Sequence
  Description of Artificial Sequence: Synthetic peptide
GFYISYSSIH

SEQ ID NO: 430 - protein, 10 aa, Artificial Sequence
  Description of Artificial Sequence: Synthetic peptide
GFSIYYSSIH

SEQ ID NO: 431 - protein, 10 aa, Artificial Sequence
  Description of Artificial Sequence: Synthetic peptide
GFYIYSYSIH

SEQ ID NO: 432 - protein, 10 aa, Artificial Sequence
  Description of Artificial Sequence: Synthetic peptide
GFSISYSSIH

SEQ ID NO: 433 - protein, 10 aa, Artificial Sequence
  Description of Artificial Sequence: Synthetic peptide
GFSIYYSSIH

SEQ ID NO: 434 - protein, 10 aa, Artificial Sequence
  Description of Artificial Sequence: Synthetic peptide
GFSIYYYSIH

SEQ ID NO: 435 - protein, 10 aa, Artificial Sequence
  Description of Artificial Sequence: Synthetic peptide
GFSIYYSSIH

SEQ ID NO: 436 - protein, 10 aa, Artificial Sequence
  Description of Artificial Sequence: Synthetic peptide
GFSIYYYSIH

SEQ ID NO: 437 - protein, 10 aa, Artificial Sequence
  Description of Artificial Sequence: Synthetic peptide
GFYIYSYSIH

SEQ ID NO: 438 - protein, 10 aa, Artificial Sequence
  Description of Artificial Sequence: Synthetic peptide
GFYIYSSSIH

SEQ ID NO: 439 - protein, 10 aa, Artificial Sequence
  Description of Artificial Sequence: Synthetic peptide
GFYIYYYSIH

SEQ ID NO: 440 - protein, 17 aa, Artificial Sequence
  Description of Artificial Sequence: Synthetic peptide
SISPYYGYTSYADSVKG

SEQ ID NO: 441 - protein, 17 aa, Artificial Sequence
  Description of Artificial Sequence: Synthetic peptide
SISPYYGYTSYADSVKG

SEQ ID NO: 442 - protein, 17 aa, Artificial Sequence
  Description of Artificial Sequence: Synthetic peptide
SISPYYGYTSYADSVKG

SEQ ID NO: 443 - protein, 17 aa, Artificial Sequence
  Description of Artificial Sequence: Synthetic peptide
SISPYYGYTSYADSVKG

SEQ ID NO: 444 - protein, 17 aa, Artificial Sequence
  Description of Artificial Sequence: Synthetic peptide
SISPYYGSTSYADSVKG

SEQ ID NO: 445 - protein, 17 aa, Artificial Sequence
  Description of Artificial Sequence: Synthetic peptide
SISPYYGYTSYADSVKG

SEQ ID NO: 446 - protein, 17 aa, Artificial Sequence
  Description of Artificial Sequence: Synthetic peptide
SISPYYGSTSYADSVKG

SEQ ID NO: 447 - protein, 17 aa, Artificial Sequence
  Description of Artificial Sequence: Synthetic peptide
YISPYYGYTYYADSVKG

SEQ ID NO: 448 - protein, 17 aa, Artificial Sequence
  Description of Artificial Sequence: Synthetic peptide
SIYPSYGSTYYADSVKG

SEQ ID NO: 449 - protein, 17 aa, Artificial Sequence
  Description of Artificial Sequence: Synthetic peptide
SISPYYGYTSYADSVKG

SEQ ID NO: 450 - protein, 17 aa, Artificial Sequence
  Description of Artificial Sequence: Synthetic peptide
YISPYYGYTYYADSVKG

SEQ ID NO: 451 - protein, 17 aa, Artificial Sequence
  Description of Artificial Sequence: Synthetic peptide
SISPYYGYTSYADSVKG

SEQ ID NO: 452 - protein, 17 aa, Artificial Sequence
  Description of Artificial Sequence: Synthetic peptide
SISPYYGYTSYADSVKG

SEQ ID NO: 453 - protein, 17 aa, Artificial Sequence
  Description of Artificial Sequence: Synthetic peptide
YISPYSGSTSYADSVKG

SEQ ID NO: 454 - protein, 17 aa, Artificial Sequence
  Description of Artificial Sequence: Synthetic peptide
SISPYYGYTSYADSVKG

SEQ ID NO: 455 - protein, 17 aa, Artificial Sequence
  Description of Artificial Sequence: Synthetic peptide
SISPYYGYTSYADSVKG

SEQ ID NO: 456 - protein, 17 aa, Artificial Sequence
  Description of Artificial Sequence: Synthetic peptide
SISPYYGYTSYADSVKG

SEQ ID NO: 457 - protein, 17 aa, Artificial Sequence
  Description of Artificial Sequence: Synthetic peptide
SISPYYGYTSYADSVKG

SEQ ID NO: 458 - protein, 17 aa, Artificial Sequence
  Description of Artificial Sequence: Synthetic peptide
SISPYYGYTSYADSVKG

SEQ ID NO: 459 - protein, 17 aa, Artificial Sequence
  Description of Artificial Sequence: Synthetic peptide
SISPYYGYTSYADSVKG

SEQ ID NO: 460 - protein, 17 aa, Artificial Sequence
  Description of Artificial Sequence: Synthetic peptide
SISPYYGYTSYADSVKG

SEQ ID NO: 461 - protein, 17 aa, Artificial Sequence
  Description of Artificial Sequence: Synthetic peptide
YISPYYGYTSYADSVKG

SEQ ID NO: 462 - protein, 17 aa, Artificial Sequence
  Description of Artificial Sequence: Synthetic peptide
YISPYYGYTSYADSVKG

SEQ ID NO: 463 - protein, 17 aa, Artificial Sequence
  Description of Artificial Sequence: Synthetic peptide
YISPYYGYTYYADSVKG

SEQ ID NO: 464 - protein, 17 aa, Artificial Sequence
  Description of Artificial Sequence: Synthetic peptide
SISPYYGYTSYADSVKG

SEQ ID NO: 465 - protein, 17 aa, Artificial Sequence
  Description of Artificial Sequence: Synthetic peptide
SISPYYGYTSYADSVKG

SEQ ID NO: 466 - protein, 17 aa, Artificial Sequence
  Description of Artificial Sequence: Synthetic peptide
SISPYYGSTSYADSVKG

SEQ ID NO: 467 - protein, 17 aa, Artificial Sequence
  Description of Artificial Sequence: Synthetic peptide
SISPYYGYTSYADSVKG

SEQ ID NO: 468 - protein, 17 aa, Artificial Sequence
  Description of Artificial Sequence: Synthetic peptide
SISPYYGYTSYADSVKG

SEQ ID NO: 469 - protein, 17 aa, Artificial Sequence
  Description of Artificial Sequence: Synthetic peptide
SISPYYGYTSYADSVKG

SEQ ID NO: 470 - protein, 17 aa, Artificial Sequence
  Description of Artificial Sequence: Synthetic peptide
SISPYYGYTSYADSVKG

SEQ ID NO: 471 - protein, 17 aa, Artificial Sequence
  Description of Artificial Sequence: Synthetic peptide
SISPYYGSTSYADSVKG

SEQ ID NO: 472 - protein, 17 aa, Artificial Sequence
  Description of Artificial Sequence: Synthetic peptide
SISPYYGSTSYADSVKG

SEQ ID NO: 473 - protein, 17 aa, Artificial Sequence
  Description of Artificial Sequence: Synthetic peptide
SISPYYGYTSYADSVKG

SEQ ID NO: 474 - protein, 17 aa, Artificial Sequence
  Description of Artificial Sequence: Synthetic peptide
SISPYYGSTSYADSVKG

SEQ ID NO: 475 - protein, 17 aa, Artificial Sequence
  Description of Artificial Sequence: Synthetic peptide
SISPYYGYTSYADSVKG

SEQ ID NO: 476 - protein, 17 aa, Artificial Sequence
  Description of Artificial Sequence: Synthetic peptide
SISPYYGYTSYADSVKG

SEQ ID NO: 477 - protein, 17 aa, Artificial Sequence
  Description of Artificial Sequence: Synthetic peptide
SISPYYGYTSYADSVKG

SEQ ID NO: 478 - protein, 17 aa, Artificial Sequence
  Description of Artificial Sequence: Synthetic peptide
SISPYYGSTSYADSVKG

SEQ ID NO: 479 - protein, 17 aa, Artificial Sequence
  Description of Artificial Sequence: Synthetic peptide
SISPYYGYTSYADSVKG

SEQ ID NO: 480 - protein, 17 aa, Artificial Sequence
  Description of Artificial Sequence: Synthetic peptide
SISPSYGYTSYADSVKG

SEQ ID NO: 481 - protein, 17 aa, Artificial Sequence
  Description of Artificial Sequence: Synthetic peptide
YISPSSGYTSYADSVKG

SEQ ID NO: 482 - protein, 17 aa, Artificial Sequence
  Description of Artificial Sequence: Synthetic peptide
SISPYYGSTSYADSVKG

SEQ ID NO: 483 - protein, 17 aa, Artificial Sequence
  Description of Artificial Sequence: Synthetic peptide
SIYPYSGSTYYADSVKG

SEQ ID NO: 484 - protein, 17 aa, Artificial Sequence
  Description of Artificial Sequence: Synthetic peptide
SISPYYGYTSYADSVKG

SEQ ID NO: 485 - protein, 17 aa, Artificial Sequence
  Description of Artificial Sequence: Synthetic peptide
SISPYYGYTSYADSVKG

SEQ ID NO: 486 - protein, 17 aa, Artificial Sequence
  Description of Artificial Sequence: Synthetic peptide
YISPSSGSTSYADSVKG

SEQ ID NO: 487 - protein, 17 aa, Artificial Sequence
  Description of Artificial Sequence: Synthetic peptide
SIYPSSGSTSYADSVKG

SEQ ID NO: 488 - protein, 17 aa, Artificial Sequence
  Description of Artificial Sequence: Synthetic peptide
YISPYYGYTSYADSVKG

SEQ ID NO: 489 - protein, 17 aa, Artificial Sequence
  Description of Artificial Sequence: Synthetic peptide
SISPYYGYTSYADSVKG

SEQ ID NO: 490 - protein, 17 aa, Artificial Sequence
  Description of Artificial Sequence: Synthetic peptide
YISPSYGSTYYADSVKG

SEQ ID NO: 491 - protein, 17 aa, Artificial Sequence
  Description of Artificial Sequence: Synthetic peptide
SISPYSGSTSYADSVKG

SEQ ID NO: 492 - protein, 17 aa, Artificial Sequence
  Description of Artificial Sequence: Synthetic peptide
SIYPYSGSTYYADSVKG

SEQ ID NO: 493 - protein, 17 aa, Artificial Sequence
  Description of Artificial Sequence: Synthetic peptide
YISPSSGYTSYADSVKG

SEQ ID NO: 494 - protein, 17 aa, Artificial Sequence
  Description of Artificial Sequence: Synthetic peptide
YISPSSGYTSYADSVKG

SEQ ID NO: 495 - protein, 17 aa, Artificial Sequence
  Description of Artificial Sequence: Synthetic peptide
YISPYYGYTSYADSVKG

SEQ ID NO: 496 - protein, 17 aa, Artificial Sequence
  Description of Artificial Sequence: Synthetic peptide
SISPYYGYTSYADSVKG

SEQ ID NO: 497 - protein, 17 aa, Artificial Sequence
  Description of Artificial Sequence: Synthetic peptide
YISPYYGYTSYADSVKG

SEQ ID NO: 498 - protein, 17 aa, Artificial Sequence
  Description of Artificial Sequence: Synthetic peptide
SISPYYGYTSYADSVKG

SEQ ID NO: 499 - protein, 17 aa, Artificial Sequence
  Description of Artificial Sequence: Synthetic peptide
SISPYYGYTSYADSVKG

SEQ ID NO: 500 - protein, 17 aa, Artificial Sequence
  Description of Artificial Sequence: Synthetic peptide
SISPSYGSTSYADSVKG

SEQ ID NO: 501 - protein, 17 aa, Artificial Sequence
  Description of Artificial Sequence: Synthetic peptide
YIYPYSGSTYYADSVKG

SEQ ID NO: 502 - protein, 17 aa, Artificial Sequence
  Description of Artificial Sequence: Synthetic peptide
SIYPYSGSTSYADSVKG

SEQ ID NO: 503 - protein, 17 aa, Artificial Sequence
  Description of Artificial Sequence: Synthetic peptide
YISPYYGYTSYADSVKG

SEQ ID NO: 504 - protein, 17 aa, Artificial Sequence
  Description of Artificial Sequence: Synthetic peptide
YISPYYGYTSYADSVKG

SEQ ID NO: 505 - protein, 17 aa, Artificial Sequence
  Description of Artificial Sequence: Synthetic peptide
SIYPSYGSTSYADSVKG

SEQ ID NO: 506 - protein, 17 aa, Artificial Sequence
  Description of Artificial Sequence: Synthetic peptide
YIYPSYGYTSYADSVKG

SEQ ID NO: 507 - protein, 17 aa, Artificial Sequence
  Description of Artificial Sequence: Synthetic peptide
SISPYYGSTSYADSVKG

SEQ ID NO: 508 - protein, 17 aa, Artificial Sequence
  Description of Artificial Sequence: Synthetic peptide
SISPYYGYTSYADSVKG

SEQ ID NO: 509 - protein, 17 aa, Artificial Sequence
  Description of Artificial Sequence: Synthetic peptide
SISPYYGYTSYADSVKG

SEQ ID NO: 510 - protein, 17 aa, Artificial Sequence
  Description of Artificial Sequence: Synthetic peptide
YISPYYGSTYYADSVKG

SEQ ID NO: 511 - protein, 17 aa, Artificial Sequence
  Description of Artificial Sequence: Synthetic peptide
SISPYYGYTYYADSVKG

SEQ ID NO: 512 - protein, 17 aa, Artificial Sequence
  Description of Artificial Sequence: Synthetic peptide
SISPYYGYTSYADSVKG

SEQ ID NO: 513 - protein, 17 aa, Artificial Sequence
  Description of Artificial Sequence: Synthetic peptide
SISPYYGYTYYADSVKG

SEQ ID NO: 514 - protein, 17 aa, Artificial Sequence
  Description of Artificial Sequence: Synthetic peptide
SISPSYGSTYYADSVKG

SEQ ID NO: 515 - protein, 17 aa, Artificial Sequence
  Description of Artificial Sequence: Synthetic peptide
SISPYYGYTSYADSVKG

SEQ ID NO: 516 - protein, 17 aa, Artificial Sequence
  Description of Artificial Sequence: Synthetic peptide
YISPYYGYTSYADSVKG

SEQ ID NO: 517 - protein, 17 aa, Artificial Sequence
  Description of Artificial Sequence: Synthetic peptide
SISPYYGYTSYADSVKG

SEQ ID NO: 518 - protein, 17 aa, Artificial Sequence
  Description of Artificial Sequence: Synthetic peptide
SIYPSSGYTSYADSVKG

SEQ ID NO: 519 - protein, 17 aa, Artificial Sequence
  Description of Artificial Sequence: Synthetic peptide
YISPSSGYTSYADSVKG

SEQ ID NO: 520 - protein, 17 aa, Artificial Sequence
  Description of Artificial Sequence: Synthetic peptide
YISPYSGSTSYADSVKG

SEQ ID NO: 521 - protein, 17 aa, Artificial Sequence
  Description of Artificial Sequence: Synthetic peptide
SISPYYGYTSYADSVKG

SEQ ID NO: 522 - protein, 17 aa, Artificial Sequence
  Description of Artificial Sequence: Synthetic peptide
SISPYYGSTSYADSVKG

SEQ ID NO: 523 - protein, 17 aa, Artificial Sequence
  Description of Artificial Sequence: Synthetic peptide
YIYPYSGYTSYADSVKG

SEQ ID NO: 524 - protein, 17 aa, Artificial Sequence
  Description of Artificial Sequence: Synthetic peptide
SISPYYGSTSYADSVKG

SEQ ID NO: 525 - protein, 17 aa, Artificial Sequence
  Description of Artificial Sequence: Synthetic peptide
SISPYYGYTSYADSVKG

SEQ ID NO: 526 - protein, 17 aa, Artificial Sequence
  Description of Artificial Sequence: Synthetic peptide
SISPYYGYTSYADSVKG

SEQ ID NO: 527 - protein, 17 aa, Artificial Sequence
  Description of Artificial Sequence: Synthetic peptide
SISPYYGYTSYADSVKG

SEQ ID NO: 528 - protein, 17 aa, Artificial Sequence
  Description of Artificial Sequence: Synthetic peptide
SISPYYGYTSYADSVKG

SEQ ID NO: 529 - protein, 17 aa, Artificial Sequence
  Description of Artificial Sequence: Synthetic peptide
SISPYYGYTSYADSVKG

SEQ ID NO: 530 - protein, 17 aa, Artificial Sequence
  Description of Artificial Sequence: Synthetic peptide
YISPYYGSTSYADSVKG

SEQ ID NO: 531 - protein, 17 aa, Artificial Sequence
  Description of Artificial Sequence: Synthetic peptide
SISPYYGYTYYADSVKG

SEQ ID NO: 532 - protein, 17 aa, Artificial Sequence
  Description of Artificial Sequence: Synthetic peptide
SISPYYGYTSYADSVKG

SEQ ID NO: 533 - protein, 17 aa, Artificial Sequence
  Description of Artificial Sequence: Synthetic peptide
YISPYYGYTSYADSVKG

SEQ ID NO: 534 - protein, 17 aa, Artificial Sequence
  Description of Artificial Sequence: Synthetic peptide
YISPYYGYTYYADSVKG

SEQ ID NO: 535 - protein, 17 aa, Artificial Sequence
  Description of Artificial Sequence: Synthetic peptide
YISPYYGYTSYADSVKG

SEQ ID NO: 536 - protein, 17 aa, Artificial Sequence
  Description of Artificial Sequence: Synthetic peptide
YISPYYGYTSYADSVKG

SEQ ID NO: 537 - protein, 17 aa, Artificial Sequence
  Description of Artificial Sequence: Synthetic peptide
YISPYYGYTSYADSVKG

SEQ ID NO: 538 - protein, 17 aa, Artificial Sequence
  Description of Artificial Sequence: Synthetic peptide
SISPYYGYTSYADSVKG

SEQ ID NO: 539 - protein, 17 aa, Artificial Sequence
  Description of Artificial Sequence: Synthetic peptide
SISPYSGYTYYADSVKG

SEQ ID NO: 540 - protein, 17 aa, Artificial Sequence
  Description of Artificial Sequence: Synthetic peptide
SISPYSGSTSYADSVKG

SEQ ID NO: 541 - protein, 17 aa, Artificial Sequence
  Description of Artificial Sequence: Synthetic peptide
SIYPSSGYTSYADSVKG

SEQ ID NO: 542 - protein, 17 aa, Artificial Sequence
  Description of Artificial Sequence: Synthetic peptide
SIYPYYGYTYYADSVKG

SEQ ID NO: 543 - protein, 17 aa, Artificial Sequence
  Description of Artificial Sequence: Synthetic peptide
YISPYYGYTSYADSVKG

SEQ ID NO: 544 - protein, 17 aa, Artificial Sequence
  Description of Artificial Sequence: Synthetic peptide
SISPYYGYTSYADSVKG

SEQ ID NO: 545 - protein, 17 aa, Artificial Sequence
  Description of Artificial Sequence: Synthetic peptide
SISPYYGYTSYADSVKG

SEQ ID NO: 546 - protein, 17 aa, Artificial Sequence
  Description of Artificial Sequence: Synthetic peptide
SISPYYGYTYYADSVKG

SEQ ID NO: 547 - protein, 17 aa, Artificial Sequence
  Description of Artificial Sequence: Synthetic peptide
SISPYYGYTSYADSVKG

SEQ ID NO: 548 - protein, 17 aa, Artificial Sequence
  Description of Artificial Sequence: Synthetic peptide
YISPYSGYTSYADSVKG

SEQ ID NO: 549 - protein, 17 aa, Artificial Sequence
  Description of Artificial Sequence: Synthetic peptide
SISPYYGYTSYADSVKG

SEQ ID NO: 550 - protein, 17 aa, Artificial Sequence
  Description of Artificial Sequence: Synthetic peptide
SISPYYGYTSYADSVKG

SEQ ID NO: 551 - protein, 17 aa, Artificial Sequence
  Description of Artificial Sequence: Synthetic peptide
YISPSSGSTSYADSVKG

SEQ ID NO: 552 - protein, 17 aa, Artificial Sequence
  Description of Artificial Sequence: Synthetic peptide
YISPYSGSTSYADSVKG

SEQ ID NO: 553 - protein, 17 aa, Artificial Sequence
  Description of Artificial Sequence: Synthetic peptide
SISPYYGYTSYADSVKG

SEQ ID NO: 554 - protein, 17 aa, Artificial Sequence
  Description of Artificial Sequence: Synthetic peptide
YISPYYGSTSYADSVKG

SEQ ID NO: 555 - protein, 17 aa, Artificial Sequence
  Description of Artificial Sequence: Synthetic peptide
YISPYYGSTYYADSVKG

SEQ ID NO: 556 - protein, 17 aa, Artificial Sequence
  Description of Artificial Sequence: Synthetic peptide
SISPYYGYTSYADSVKG

SEQ ID NO: 557 - protein, 17 aa, Artificial Sequence
  Description of Artificial Sequence: Synthetic peptide
YISPYYGSTYYADSVKG

SEQ ID NO: 558 - protein, 17 aa, Artificial Sequence
  Description of Artificial Sequence: Synthetic peptide
SISPFYGYTYYADSVKG

SEQ ID NO: 559 - protein, 17 aa, Artificial Sequence
  Description of Artificial Sequence: Synthetic peptide
YISPYYGYTYYADSVKG

SEQ ID NO: 560 - protein, 17 aa, Artificial Sequence
  Description of Artificial Sequence: Synthetic peptide
YISPSSGYTYYADSVKG

SEQ ID NO: 561 - protein, 17 aa, Artificial Sequence
  Description of Artificial Sequence: Synthetic peptide
SISPYYGYTSYADSVKG

SEQ ID NO: 562 - protein, 16 aa, Artificial Sequence
  Description of Artificial Sequence: Synthetic peptide
YYYSYSSYYYYYAFDY

SEQ ID NO: 563 - protein, 16 aa, Artificial Sequence
  Description of Artificial Sequence: Synthetic peptide
YYYSYSSSSYYYGLDY

SEQ ID NO: 564 - protein, 16 aa, Artificial Sequence
  Description of Artificial Sequence: Synthetic peptide
YYYSYSYSSYYYGMDY

SEQ ID NO: 565 - protein, 16 aa, Artificial Sequence
  Description of Artificial Sequence: Synthetic peptide
YYYSYYSYSSYYGLDY

SEQ ID NO: 566 - protein, 16 aa, Artificial Sequence
  Description of Artificial Sequence: Synthetic peptide
YYYSYSSYSSYYGLDY

SEQ ID NO: 567 - protein, 16 aa, Artificial Sequence
  Description of Artificial Sequence: Synthetic peptide
YYYSYSSYSSYSGLDY

SEQ ID NO: 568 - protein, 16 aa, Artificial Sequence
  Description of Artificial Sequence: Synthetic peptide
YYYSYSYSYYYSGMDY

SEQ ID NO: 569 - protein, 16 aa, Artificial Sequence
  Description of Artificial Sequence: Synthetic peptide
YYYSYSSYYSYSGLDY

SEQ ID NO: 570 - protein, 16 aa, Artificial Sequence
  Description of Artificial Sequence: Synthetic peptide
YYYYYYYYSYYSGLDY

SEQ ID NO: 571 - protein, 16 aa, Artificial Sequence
  Description of Artificial Sequence: Synthetic peptide
YSYSYSSYSSYSGLDY

SEQ ID NO: 572 - protein, 16 aa, Artificial Sequence
  Description of Artificial Sequence: Synthetic peptide
SYYSYSSYSSSYGMDY

SEQ ID NO: 573 - protein, 16 aa, Artificial Sequence
  Description of Artificial Sequence: Synthetic peptide
SYYSYSSSSSSYGIDY

SEQ ID NO: 574 - protein, 17 aa, Artificial Sequence
  Description of Artificial Sequence: Synthetic peptide
YYYSYSYYYSYYYGMDY

SEQ ID NO: 575 - protein, 18 aa, Artificial Sequence
  Description of Artificial Sequence: Synthetic peptide
YYSYSYYYYYSYYYGMDY

SEQ ID NO: 576 - protein, 15 aa, Artificial Sequence
  Description of Artificial Sequence: Synthetic peptide
YYYSYSGYSYYGFDY

SEQ ID NO: 577 - protein, 15 aa, Artificial Sequence
  Description of Artificial Sequence: Synthetic peptide
YYYSYSYYSYRAMDY

SEQ ID NO: 578 - protein, 15 aa, Artificial Sequence
  Description of Artificial Sequence: Synthetic peptide
YYYSYYSYSYRGLDY

SEQ ID NO: 579 - protein, 15 aa, Artificial Sequence
  Description of Artificial Sequence: Synthetic peptide
YYYSYSGYSYSGIDY

SEQ ID NO: 580 - protein, 16 aa, Artificial Sequence
  Description of Artificial Sequence: Synthetic peptide
YYYSYRYSGGSSAMDY

SEQ ID NO: 581 - protein, 16 aa, Artificial Sequence
  Description of Artificial Sequence: Synthetic peptide
YYYSYRGYSGSYGLDY

SEQ ID NO: 582 - protein, 16 aa, Artificial Sequence
  Description of Artificial Sequence: Synthetic peptide
YYYSYSGYSGSYGLDY

SEQ ID NO: 583 - protein, 16 aa, Artificial Sequence
  Description of Artificial Sequence: Synthetic peptide
YYYSYSSYSSYGGMDY

SEQ ID NO: 584 - protein, 16 aa, Artificial Sequence
  Description of Artificial Sequence: Synthetic peptide
YYYSYSSSRYYSGMDY

SEQ ID NO: 585 - protein, 16 aa, Artificial Sequence
  Description of Artificial Sequence: Synthetic peptide
YYYSYSSSSRYSGLDY

SEQ ID NO: 586 - protein, 16 aa, Artificial Sequence
  Description of Artificial Sequence: Synthetic peptide
YYYSYRYYGGYYGMDY

SEQ ID NO: 587 - protein, 16 aa, Artificial Sequence
  Description of Artificial Sequence: Synthetic peptide
YYYSYRYGSGYYGMDY

SEQ ID NO: 588 - protein, 16 aa, Artificial Sequence
  Description of Artificial Sequence: Synthetic peptide
YYYSYSYYSGYYGLDY

SEQ ID NO: 589 - protein, 16 aa, Artificial Sequence
  Description of Artificial Sequence: Synthetic peptide
YYYSYSSYGSYYGLDY

SEQ ID NO: 590 - protein, 16 aa, Artificial Sequence
  Description of Artificial Sequence: Synthetic peptide
YYYSYSGYSYYYGLDY

SEQ ID NO: 591 - protein, 16 aa, Artificial Sequence
  Description of Artificial Sequence: Synthetic peptide
YYYSYSSSYGYYGLDY

SEQ ID NO: 592 - protein, 16 aa, Artificial Sequence
  Description of Artificial Sequence: Synthetic peptide
YYYSYSYYSGYYGMDY

SEQ ID NO: 593 - protein, 16 aa, Artificial Sequence
  Description of Artificial Sequence: Synthetic peptide
YYYSYRSYSRYYGLDY

SEQ ID NO: 594 - protein, 16 aa, Artificial Sequence
  Description of Artificial Sequence: Synthetic peptide
YYYSYYYYGSYYGLDY

SEQ ID NO: 595 - protein, 16 aa, Artificial Sequence
  Description of Artificial Sequence: Synthetic peptide
YYYSYSGYGGYYGLDY

SEQ ID NO: 596 - protein, 17 aa, Artificial Sequence
  Description of Artificial Sequence: Synthetic peptide
YYYSYGYSSGYYYGLDY

SEQ ID NO: 597 - protein, 17 aa, Artificial Sequence
  Description of Artificial Sequence: Synthetic peptide
YYYSYRYYSGYYYGMDY

SEQ ID NO: 598 - protein, 17 aa, Artificial Sequence
  Description of Artificial Sequence: Synthetic peptide
YYYSYSSYYSYGYGMDY

SEQ ID NO: 599 - protein, 17 aa, Artificial Sequence
  Description of Artificial Sequence: Synthetic peptide
YYYSYRYSSSSYYGMDY

SEQ ID NO: 600 - protein, 17 aa, Artificial Sequence
  Description of Artificial Sequence: Synthetic peptide
YYYSYRYSYGSSYGLDY

SEQ ID NO: 601 - protein, 17 aa, Artificial Sequence
  Description of Artificial Sequence: Synthetic peptide
YYYSYRSSRYSSYGMDY

SEQ ID NO: 602 - protein, 18 aa, Artificial Sequence
  Description of Artificial Sequence: Synthetic peptide
YYYSYSSGYYYYYYGMDY

SEQ ID NO: 603 - protein, 18 aa, Artificial Sequence
  Description of Artificial Sequence: Synthetic peptide
YYYSSYGYYYSGYYGLDY

SEQ ID NO: 604 - protein, 18 aa, Artificial Sequence
  Description of Artificial Sequence: Synthetic peptide
YYYSYGGSSYGSYYGMDY

SEQ ID NO: 605 - protein, 16 aa, Artificial Sequence
  Description of Artificial Sequence: Synthetic peptide
YYYYYGYSYRYSGFDY

SEQ ID NO: 606 - protein, 16 aa, Artificial Sequence
  Description of Artificial Sequence: Synthetic peptide
YYYYYSYYGGYYGLDY

SEQ ID NO: 607 - protein, 17 aa, Artificial Sequence
  Description of Artificial Sequence: Synthetic peptide
YYYYYSSSSRGYYGMDY

SEQ ID NO: 608 - protein, 17 aa, Artificial Sequence
  Description of Artificial Sequence: Synthetic peptide
YYYGYYGYGSYYYGLDY

SEQ ID NO: 609 - protein, 20 aa, Artificial Sequence
  Description of Artificial Sequence: Synthetic peptide
YYYGRYYGYGYSYYRRAIDY

SEQ ID NO: 610 - protein, 15 aa, Artificial Sequence
  Description of Artificial Sequence: Synthetic peptide
YYYGYSYYSSSGMDY

SEQ ID NO: 611 - protein, 15 aa, Artificial Sequence
  Description of Artificial Sequence: Synthetic peptide
YYYGYSSYSYSALDY

SEQ ID NO: 612 - protein, 15 aa, Artificial Sequence
  Description of Artificial Sequence: Synthetic peptide
GGRYSYYGYSYGLDY

SEQ ID NO: 613 - protein, 16 aa, Artificial Sequence
  Description of Artificial Sequence: Synthetic peptide
GGSYGGSYSSYYAFDY

SEQ ID NO: 614 - protein, 20 aa, Artificial Sequence
  Description of Artificial Sequence: Synthetic peptide
GGYYYYYSYSYSYYSYGFDY

SEQ ID NO: 615 - protein, 14 aa, Artificial Sequence
  Description of Artificial Sequence: Synthetic peptide
GRSYGSRYGRGFDY

SEQ ID NO: 616 - protein, 14 aa, Artificial Sequence
  Description of Artificial Sequence: Synthetic peptide
GSSYGSSYYSGMDY

SEQ ID NO: 617 - protein, 18 aa, Artificial Sequence
  Description of Artificial Sequence: Synthetic peptide
GYRYYRRSYGSYYYGMDY

SEQ ID NO: 618 - protein, 16 aa, Artificial Sequence
  Description of Artificial Sequence: Synthetic peptide
RSYYYRYRSSYSGLDY

SEQ ID NO: 619 - protein, 16 aa, Artificial Sequence
  Description of Artificial Sequence: Synthetic peptide
RSYSYSSYSSSSGMDY

SEQ ID NO: 620 - protein, 16 aa, Artificial Sequence
  Description of Artificial Sequence: Synthetic peptide
RSYSYSSSSYYSALDY

SEQ ID NO: 621 - protein, 16 aa, Artificial Sequence
  Description of Artificial Sequence: Synthetic peptide
RSYYYRYRSSYSGLDY

SEQ ID NO: 622 - protein, 18 aa, Artificial Sequence
  Description of Artificial Sequence: Synthetic peptide
RYRYYSGYRGRYRGGMDY

SEQ ID NO: 623 - protein, 15 aa, Artificial Sequence
  Description of Artificial Sequence: Synthetic peptide
SRYRSYYYSRYGLDY

SEQ ID NO: 624 - protein, 16 aa, Artificial Sequence
  Description of Artificial Sequence: Synthetic peptide
SRYYRGYYYGYSALDY

SEQ ID NO: 625 - protein, 16 aa, Artificial Sequence
  Description of Artificial Sequence: Synthetic peptide
SRYYYRYYSSYSGMDY

SEQ ID NO: 626 - protein, 16 aa, Artificial Sequence
  Description of Artificial Sequence: Synthetic peptide
SSYSYSSYSSYRGMDY

SEQ ID NO: 627 - protein, 18 aa, Artificial Sequence
  Description of Artificial Sequence: Synthetic peptide
SYRYYRSYRRGYYYALDY

SEQ ID NO: 628 - protein, 19 aa, Artificial Sequence
  Description of Artificial Sequence: Synthetic peptide
SYSGYYGYYYSSGGYGMDY

SEQ ID NO: 629 - protein, 15 aa, Artificial Sequence
  Description of Artificial Sequence: Synthetic peptide
YRYGYSYYSYYGLDY

SEQ ID NO: 630 - protein, 16 aa, Artificial Sequence
  Description of Artificial Sequence: Synthetic peptide
YRYSYSSYSGYYGIDY

SEQ ID NO: 631 - protein, 16 aa, Artificial Sequence
  Description of Artificial Sequence: Synthetic peptide
YRYSYSYSSGYSGLDY

SEQ ID NO: 632 - protein, 16 aa, Artificial Sequence
  Description of Artificial Sequence: Synthetic peptide
YRYSYRSSSSYYGLDY

SEQ ID NO: 633 - protein, 16 aa, Artificial Sequence
  Description of Artificial Sequence: Synthetic peptide
YRYSYRSSSSYYGLDY

SEQ ID NO: 634 - protein, 17 aa, Artificial Sequence
  Description of Artificial Sequence: Synthetic peptide
YRYSYSYRSRSSYGLDY

SEQ ID NO: 635 - protein, 18 aa, Artificial Sequence
  Description of Artificial Sequence: Synthetic peptide
YRYSYSYSSSSSSSAFDY

SEQ ID NO: 636 - protein, 20 aa, Artificial Sequence
  Description of Artificial Sequence: Synthetic peptide
YSGYYSYYGYYYYSYGGLDY

SEQ ID NO: 637 - protein, 15 aa, Artificial Sequence
  Description of Artificial Sequence: Synthetic peptide
YSYGYSSYSYSGLDY

SEQ ID NO: 638 - protein, 15 aa, Artificial Sequence
  Description of Artificial Sequence: Synthetic peptide
YSYSYSGYSYSGLDY

SEQ ID NO: 639 - protein, 17 aa, Artificial Sequence
  Description of Artificial Sequence: Synthetic peptide
YSYSYRSYSSYSSGMDY

SEQ ID NO: 640 - protein, 20 aa, Artificial Sequence
  Description of Artificial Sequence: Synthetic peptide
YYGYRGRYSGYSYYSSGMDY

SEQ ID NO: 641 - protein, 20 aa, Artificial Sequence
  Description of Artificial Sequence: Synthetic peptide
YYGGGYYYYGGYSYYYGIDY

SEQ ID NO: 642 - protein, 18 aa, Artificial Sequence
  Description of Artificial Sequence: Synthetic peptide
YYSGYYYSYRSYYYGLDY

SEQ ID NO: 643 - protein, 16 aa, Artificial Sequence
  Description of Artificial Sequence: Synthetic peptide
RYYYYSYSSYYSGMDY

SEQ ID NO: 644 - protein, 16 aa, Artificial Sequence
  Description of Artificial Sequence: Synthetic peptide
RYYYYSYSSSYYALDY

SEQ ID NO: 645 - protein, 16 aa, Artificial Sequence
  Description of Artificial Sequence: Synthetic peptide
GYYSGYYSSYGYGLDY

SEQ ID NO: 646 - protein, 13 aa, Artificial Sequence
  Description of Artificial Sequence: Synthetic peptide
RYYSRRYYRGMDY

SEQ ID NO: 647 - protein, 13 aa, Artificial Sequence
  Description of Artificial Sequence: Synthetic peptide
RYYRSRYYRGFDY

SEQ ID NO: 648 - protein, 16 aa, Artificial Sequence
  Description of Artificial Sequence: Synthetic peptide
RYYSYRSYSYYSGLDY

SEQ ID NO: 649 - protein, 16 aa, Artificial Sequence
  Description of Artificial Sequence: Synthetic peptide
RYYSYSRSSSYRGLDY

SEQ ID NO: 650 - protein, 16 aa, Artificial Sequence
  Description of Artificial Sequence: Synthetic peptide
RYYSYSSYSSRSGLDY

SEQ ID NO: 651 - protein, 16 aa, Artificial Sequence
  Description of Artificial Sequence: Synthetic peptide
RYYSYSYSYSYYALDY

SEQ ID NO: 652 - protein, 16 aa, Artificial Sequence
  Description of Artificial Sequence: Synthetic peptide
RYYSYRSSRYYYGLDY

SEQ ID NO: 653 - protein, 16 aa, Artificial Sequence
  Description of Artificial Sequence: Synthetic peptide
RYYSYSYSYRYYGMDY

SEQ ID NO: 654 - protein, 16 aa, Artificial Sequence
  Description of Artificial Sequence: Synthetic peptide
RYYSYSSYSSYYGLDY

SEQ ID NO: 655 - protein, 16 aa, Artificial Sequence
  Description of Artificial Sequence: Synthetic peptide
RYYSYSSYSSYSGLDY

SEQ ID NO: 656 - protein, 21 aa, Artificial Sequence
  Description of Artificial Sequence: Synthetic peptide
RYYSYGSGSGYYYSYGYAFDY

SEQ ID NO: 657 - protein, 16 aa, Artificial Sequence
  Description of Artificial Sequence: Synthetic peptide
SYYSYSSYSSSRGMDY

SEQ ID NO: 658 - protein, 16 aa, Artificial Sequence
  Description of Artificial Sequence: Synthetic peptide
SYYSYSSYSRSSGFDY

SEQ ID NO: 659 - protein, 16 aa, Artificial Sequence
  Description of Artificial Sequence: Synthetic peptide
SYYSYGGSYYYGGLDY

SEQ ID NO: 660 - protein, 15 aa, Artificial Sequence
  Description of Artificial Sequence: Synthetic peptide
FRYSYGGYSRNGLDY

SEQ ID NO: 661 - protein, 12 aa, Artificial Sequence
  Description of Artificial Sequence: Synthetic peptide
GHYSRGWNGMDY

SEQ ID NO: 662 - protein, 16 aa, Artificial Sequence
  Description of Artificial Sequence: Synthetic peptide
GKYGKYYYGRMEGFDY

SEQ ID NO: 663 - protein, 16 aa, Artificial Sequence
  Description of Artificial Sequence: Synthetic peptide
GSGYYWRIYRWGGMDY

SEQ ID NO: 664 - protein, 13 aa, Artificial Sequence
  Description of Artificial Sequence: Synthetic peptide
GYLGRYYYRGLDY

SEQ ID NO: 665 - protein, 16 aa, Artificial Sequence
  Description of Artificial Sequence: Synthetic peptide
KYYSYSSSSSSRGLDY

SEQ ID NO: 666 - protein, 16 aa, Artificial Sequence
  Description of Artificial Sequence: Synthetic peptide
LRYSYSSSSSRIGMDY

SEQ ID NO: 667 - protein, 16 aa, Artificial Sequence
  Description of Artificial Sequence: Synthetic peptide
RAYSYSSLAGYVGMDY

SEQ ID NO: 668 - protein, 15 aa, Artificial Sequence
  Description of Artificial Sequence: Synthetic peptide
REYGYRSYSGSAFDY

SEQ ID NO: 669 - protein, 15 aa, Artificial Sequence
  Description of Artificial Sequence: Synthetic peptide
RGGYSYWRSYRGIDY

SEQ ID NO: 670 - protein, 20 aa, Artificial Sequence
  Description of Artificial Sequence: Synthetic peptide
RHYYSYTSASGRRYWSGMDY

SEQ ID NO: 671 - protein, 17 aa, Artificial Sequence
  Description of Artificial Sequence: Synthetic peptide
RRYSYRYSSSSYSGIDY

SEQ ID NO: 672 - protein, 16 aa, Artificial Sequence
  Description of Artificial Sequence: Synthetic peptide
RSYSYSYVSEYYGMDY

SEQ ID NO: 673 - protein, 13 aa, Artificial Sequence
  Description of Artificial Sequence: Synthetic peptide
RYYYGRYWRGFDY

SEQ ID NO: 674 - protein, 16 aa, Artificial Sequence
  Description of Artificial Sequence: Synthetic peptide
RYYYRYGQYWWSGFDY

SEQ ID NO: 675 - protein, 16 aa, Artificial Sequence
  Description of Artificial Sequence: Synthetic peptide
YEYSYQYRYTFPGLDY

SEQ ID NO: 676 - protein, 20 aa, Artificial Sequence
  Description of Artificial Sequence: Synthetic peptide
YGGWSYISGVGHGYYAGFDY

SEQ ID NO: 677 - protein, 16 aa, Artificial Sequence
  Description of Artificial Sequence: Synthetic peptide
YHYHRSGRYYRSALDY

SEQ ID NO: 678 - protein, 16 aa, Artificial Sequence
  Description of Artificial Sequence: Synthetic peptide
YPYSYSSYRSYSALDY

SEQ ID NO: 679 - protein, 16 aa, Artificial Sequence
  Description of Artificial Sequence: Synthetic peptide
YRGREVYYGSRYGLDY

SEQ ID NO: 680 - protein, 15 aa, Artificial Sequence
  Description of Artificial Sequence: Synthetic peptide
YRYSYRSYSYSGMDY

SEQ ID NO: 681 - protein, 17 aa, Artificial Sequence
  Description of Artificial Sequence: Synthetic peptide
YRYGYGWYSGSYSALDY

SEQ ID NO: 682 - protein, 21 aa, Artificial Sequence
  Description of Artificial Sequence: Synthetic peptide
YYDYYYSSYGYYYSYYYGLDY

SEQ ID NO: 683 - protein, 17 aa, Artificial Sequence
  Description of Artificial Sequence: Synthetic peptide
YYYSYSAQYRSSSGLDY

SEQ ID NO: 684 - protein, 9 aa, Artificial Sequence
  Description of Artificial Sequence: Synthetic peptide
QQYYSYPST

SEQ ID NO: 685 - protein, 9 aa, Artificial Sequence
  Description of Artificial Sequence: Synthetic peptide
QQYYSYPST

SEQ ID NO: 686 - protein, 9 aa, Artificial Sequence
  Description of Artificial Sequence: Synthetic peptide
QQSYYSPST

SEQ ID NO: 687 - protein, 9 aa, Artificial Sequence
  Description of Artificial Sequence: Synthetic peptide
QQYYSSPYT

SEQ ID NO: 688 - protein, 9 aa, Artificial Sequence
  Description of Artificial Sequence: Synthetic peptide
QQYSSSPYT

SEQ ID NO: 689 - protein, 9 aa, Artificial Sequence
  Description of Artificial Sequence: Synthetic peptide
QQYYYYPYT

SEQ ID NO: 690 - protein, 9 aa, Artificial Sequence
  Description of Artificial Sequence: Synthetic peptide
QQYYYYPST

SEQ ID NO: 691 - protein, 9 aa, Artificial Sequence
  Description of Artificial Sequence: Synthetic peptide
QQYYYSPST

SEQ ID NO: 692 - protein, 9 aa, Artificial Sequence
  Description of Artificial Sequence: Synthetic peptide
QQYYSYPYT

SEQ ID NO: 693 - protein, 9 aa, Artificial Sequence
  Description of Artificial Sequence: Synthetic peptide
QQYSYSPST

SEQ ID NO: 694 - protein, 9 aa, Artificial Sequence
  Description of Artificial Sequence: Synthetic peptide
QQYYSSPST

SEQ ID NO: 695 - protein, 9 aa, Artificial Sequence
  Description of Artificial Sequence: Synthetic peptide
QQYYSSPYT

SEQ ID NO: 696 - protein, 9 aa, Artificial Sequence
  Description of Artificial Sequence: Synthetic peptide
QQYYYSPYT

SEQ ID NO: 697 - protein, 9 aa, Artificial Sequence
  Description of Artificial Sequence: Synthetic peptide
QQYYSYPYT

SEQ ID NO: 698 - protein, 9 aa, Artificial Sequence
  Description of Artificial Sequence: Synthetic peptide
QQYYSSPST

SEQ ID NO: 699 - protein, 9 aa, Artificial Sequence
  Description of Artificial Sequence: Synthetic peptide
QQYYYYPST

SEQ ID NO: 700 - protein, 9 aa, Artificial Sequence
  Description of Artificial Sequence: Synthetic peptide
QQYYSYPYT

SEQ ID NO: 701 - protein, 9 aa, Artificial Sequence
  Description of Artificial Sequence: Synthetic peptide
QQYYSYPST

SEQ ID NO: 702 - protein, 9 aa, Artificial Sequence
  Description of Artificial Sequence: Synthetic peptide
QQYYSSPST

SEQ ID NO: 703 - protein, 9 aa, Artificial Sequence
  Description of Artificial Sequence: Synthetic peptide
QQYYSSPST

SEQ ID NO: 704 - protein, 9 aa, Artificial Sequence
  Description of Artificial Sequence: Synthetic peptide
QQYYSYPST

SEQ ID NO: 705 - protein, 9 aa, Artificial Sequence
  Description of Artificial Sequence: Synthetic peptide
QQYYYSPYT

SEQ ID NO: 706 - protein, 9 aa, Artificial Sequence
  Description of Artificial Sequence: Synthetic peptide
QQYYYSPST

SEQ ID NO: 707 - protein, 9 aa, Artificial Sequence
  Description of Artificial Sequence: Synthetic peptide
QQYYSSPYT

SEQ ID NO: 708 - protein, 9 aa, Artificial Sequence
  Description of Artificial Sequence: Synthetic peptide
QQYYSYPYT

SEQ ID NO: 709 - protein, 9 aa, Artificial Sequence
  Description of Artificial Sequence: Synthetic peptide
QQYYSSPYT

SEQ ID NO: 710 - protein, 9 aa, Artificial Sequence
  Description of Artificial Sequence: Synthetic peptide
QQYYSSPYT

SEQ ID NO: 711 - protein, 9 aa, Artificial Sequence
  Description of Artificial Sequence: Synthetic peptide
QQYYYSPST

SEQ ID NO: 712 - protein, 9 aa, Artificial Sequence
  Description of Artificial Sequence: Synthetic peptide
QQYYSYPST

SEQ ID NO: 713 - protein, 9 aa, Artificial Sequence
  Description of Artificial Sequence: Synthetic peptide
QQYYSYPST

SEQ ID NO: 714 - protein, 9 aa, Artificial Sequence
  Description of Artificial Sequence: Synthetic peptide
QQYYSYPST

SEQ ID NO: 715 - protein, 9 aa, Artificial Sequence
  Description of Artificial Sequence: Synthetic peptide
QQYYYYPST

SEQ ID NO: 716 - protein, 9 aa, Artificial Sequence
  Description of Artificial Sequence: Synthetic peptide
QQYYSYPYT

SEQ ID NO: 717 - protein, 9 aa, Artificial Sequence
  Description of Artificial Sequence: Synthetic peptide
QQYYYYPST

SEQ ID NO: 718 - protein, 9 aa, Artificial Sequence
  Description of Artificial Sequence: Synthetic peptide
QQYYYSPST

SEQ ID NO: 719 - protein, 9 aa, Artificial Sequence
  Description of Artificial Sequence: Synthetic peptide
QQYYSSPST

SEQ ID NO: 720 - protein, 9 aa, Artificial Sequence
  Description of Artificial Sequence: Synthetic peptide
QQYYYYPYT

SEQ ID NO: 721 - protein, 9 aa, Artificial Sequence
  Description of Artificial Sequence: Synthetic peptide
QQYYSYPST

SEQ ID NO: 722 - protein, 9 aa, Artificial Sequence
  Description of Artificial Sequence: Synthetic peptide
QQYYSYPYT

SEQ ID NO: 723 - protein, 9 aa, Artificial Sequence
  Description of Artificial Sequence: Synthetic peptide
QQYYSSPYT

SEQ ID NO: 724 - protein, 9 aa, Artificial Sequence
  Description of Artificial Sequence: Synthetic peptide
QQYSYYPYT

SEQ ID NO: 725 - protein, 9 aa, Artificial Sequence
  Description of Artificial Sequence: Synthetic peptide
QQYYYSPST

SEQ ID NO: 726 - protein, 9 aa, Artificial Sequence
  Description of Artificial Sequence: Synthetic peptide
QQYYSSPYT

SEQ ID NO: 727 - protein, 9 aa, Artificial Sequence
  Description of Artificial Sequence: Synthetic peptide
QQYSSSPST

SEQ ID NO: 728 - protein, 9 aa, Artificial Sequence
  Description of Artificial Sequence: Synthetic peptide
QQSSYSPYT

SEQ ID NO: 729 - protein, 9 aa, Artificial Sequence
  Description of Artificial Sequence: Synthetic peptide
QQYYYYPYT

SEQ ID NO: 730 - protein, 9 aa, Artificial Sequence
  Description of Artificial Sequence: Synthetic peptide
QQYYSSPST

SEQ ID NO: 731 - protein, 9 aa, Artificial Sequence
  Description of Artificial Sequence: Synthetic peptide
QQYYYYPYT

SEQ ID NO: 732 - protein, 9 aa, Artificial Sequence
  Description of Artificial Sequence: Synthetic peptide
QQYYSSPST

SEQ ID NO: 733 - protein, 9 aa, Artificial Sequence
  Description of Artificial Sequence: Synthetic peptide
QQYYSYPST

SEQ ID NO: 734 - protein, 9 aa, Artificial Sequence
  Description of Artificial Sequence: Synthetic peptide
QQYYYSPST

SEQ ID NO: 735 - protein, 9 aa, Artificial Sequence
  Description of Artificial Sequence: Synthetic peptide
QQYYYYPST

SEQ ID NO: 736 - protein, 9 aa, Artificial Sequence
  Description of Artificial Sequence: Synthetic peptide
QQYYSSPYT

SEQ ID NO: 737 - protein, 9 aa, Artificial Sequence
  Description of Artificial Sequence: Synthetic peptide
QQYSSYPST

SEQ ID NO: 738 - protein, 9 aa, Artificial Sequence
  Description of Artificial Sequence: Synthetic peptide
QQYYSSPYT

SEQ ID NO: 739 - protein, 9 aa, Artificial Sequence
  Description of Artificial Sequence: Synthetic peptide
QQYSSYPST

SEQ ID NO: 740 - protein, 9 aa, Artificial Sequence
  Description of Artificial Sequence: Synthetic peptide
QQYSYSPST

SEQ ID NO: 741 - protein, 9 aa, Artificial Sequence
  Description of Artificial Sequence: Synthetic peptide
QQYYYSPST

SEQ ID NO: 742 - protein, 9 aa, Artificial Sequence
  Description of Artificial Sequence: Synthetic peptide
QQYYSSPYT

SEQ ID NO: 743 - protein, 9 aa, Artificial Sequence
  Description of Artificial Sequence: Synthetic peptide
QQYYSSPST

SEQ ID NO: 744 - protein, 9 aa, Artificial Sequence
  Description of Artificial Sequence: Synthetic peptide
QQSYYSPYT

SEQ ID NO: 745 - protein, 9 aa, Artificial Sequence
  Description of Artificial Sequence: Synthetic peptide
QQSSSYPYT

SEQ ID NO: 746 - protein, 9 aa, Artificial Sequence
  Description of Artificial Sequence: Synthetic peptide
QQYSYSPYT

SEQ ID NO: 747 - protein, 9 aa, Artificial Sequence
  Description of Artificial Sequence: Synthetic peptide
QQSYSSPST

SEQ ID NO: 748 - protein, 9 aa, Artificial Sequence
  Description of Artificial Sequence: Synthetic peptide
QQYYYSPST

SEQ ID NO: 749 - protein, 9 aa, Artificial Sequence
  Description of Artificial Sequence: Synthetic peptide
QQYYYYPYT

SEQ ID NO: 750 - protein, 9 aa, Artificial Sequence
  Description of Artificial Sequence: Synthetic peptide
QQYYSSPST

SEQ ID NO: 751 - protein, 9 aa, Artificial Sequence
  Description of Artificial Sequence: Synthetic peptide
QQSSSSPST

SEQ ID NO: 752 - protein, 9 aa, Artificial Sequence
  Description of Artificial Sequence: Synthetic peptide
QQYYSSPST

SEQ ID NO: 753 - protein, 9 aa, Artificial Sequence
  Description of Artificial Sequence: Synthetic peptide
QQYYSYPYT

SEQ ID NO: 754 - protein, 9 aa, Artificial Sequence
  Description of Artificial Sequence: Synthetic peptide
QQSSSSPST

SEQ ID NO: 755 - protein, 9 aa, Artificial Sequence
  Description of Artificial Sequence: Synthetic peptide
QQSYSSPST

SEQ ID NO: 756 - protein, 9 aa, Artificial Sequence
  Description of Artificial Sequence: Synthetic peptide
QQSSYYPYT

SEQ ID NO: 757 - protein, 9 aa, Artificial Sequence
  Description of Artificial Sequence: Synthetic peptide
QQYYSSPST

SEQ ID NO: 758 - protein, 9 aa, Artificial Sequence
  Description of Artificial Sequence: Synthetic peptide
QQYYSYPYT

SEQ ID NO: 759 - protein, 9 aa, Artificial Sequence
  Description of Artificial Sequence: Synthetic peptide
QQYYYYPYT

SEQ ID NO: 760 - protein, 9 aa, Artificial Sequence
  Description of Artificial Sequence: Synthetic peptide
QQYSSSPYT

SEQ ID NO: 761 - protein, 9 aa, Artificial Sequence
  Description of Artificial Sequence: Synthetic peptide
QQYSSYPST

SEQ ID NO: 762 - protein, 9 aa, Artificial Sequence
  Description of Artificial Sequence: Synthetic peptide
QQYYYSPST

SEQ ID NO: 763 - protein, 9 aa, Artificial Sequence
  Description of Artificial Sequence: Synthetic peptide
QQYYSYPYT

SEQ ID NO: 764 - protein, 9 aa, Artificial Sequence
  Description of Artificial Sequence: Synthetic peptide
QQYYSSPST

SEQ ID NO: 765 - protein, 9 aa, Artificial Sequence
  Description of Artificial Sequence: Synthetic peptide
QQYYSYPST

SEQ ID NO: 766 - protein, 9 aa, Artificial Sequence
  Description of Artificial Sequence: Synthetic peptide
QQYYSSPYT

SEQ ID NO: 767 - protein, 9 aa, Artificial Sequence
  Description of Artificial Sequence: Synthetic peptide
QQYYSSPYT

SEQ ID NO: 768 - protein, 9 aa, Artificial Sequence
  Description of Artificial Sequence: Synthetic peptide
QQYSSSPYT

SEQ ID NO: 769 - protein, 9 aa, Artificial Sequence
  Description of Artificial Sequence: Synthetic peptide
QQYYSYPST

SEQ ID NO: 770 - protein, 9 aa, Artificial Sequence
  Description of Artificial Sequence: Synthetic peptide
QQYSYYPST

SEQ ID NO: 771 - protein, 9 aa, Artificial Sequence
  Description of Artificial Sequence: Synthetic peptide
QQYSYYPYT

SEQ ID NO: 772 - protein, 9 aa, Artificial Sequence
  Description of Artificial Sequence: Synthetic peptide
QQSYSSPYT

SEQ ID NO: 773 - protein, 9 aa, Artificial Sequence
  Description of Artificial Sequence: Synthetic peptide
QQSYSYPYT

SEQ ID NO: 774 - protein, 9 aa, Artificial Sequence
  Description of Artificial Sequence: Synthetic peptide
QQSYSYPST

SEQ ID NO: 775 - protein, 9 aa, Artificial Sequence
  Description of Artificial Sequence: Synthetic peptide
QQSSSSPST

SEQ ID NO: 776 - protein, 9 aa, Artificial Sequence
  Description of Artificial Sequence: Synthetic peptide
QQYYSYPYT

SEQ ID NO: 777 - protein, 9 aa, Artificial Sequence
  Description of Artificial Sequence: Synthetic peptide
QQSSSSPYT

SEQ ID NO: 778 - protein, 9 aa, Artificial Sequence
  Description of Artificial Sequence: Synthetic peptide
QQYYSYPYT

SEQ ID NO: 779 - protein, 9 aa, Artificial Sequence
  Description of Artificial Sequence: Synthetic peptide
QQYYSSPST

SEQ ID NO: 780 - protein, 9 aa, Artificial Sequence
  Description of Artificial Sequence: Synthetic peptide
QQYSSSPST

SEQ ID NO: 781 - protein, 9 aa, Artificial Sequence
  Description of Artificial Sequence: Synthetic peptide
QQYYSSPST

SEQ ID NO: 782 - protein, 9 aa, Artificial Sequence
  Description of Artificial Sequence: Synthetic peptide
QQYSYSPYT

SEQ ID NO: 783 - protein, 9 aa, Artificial Sequence
  Description of Artificial Sequence: Synthetic peptide
QQYYSSPYT

SEQ ID NO: 784 - protein, 10 aa, Artificial Sequence
  Description of Artificial Sequence: Synthetic peptide
GFSIYSSSIH

SEQ ID NO: 785 - protein, 10 aa, Artificial Sequence
  Description of Artificial Sequence: Synthetic peptide
GFSISSSSIH

SEQ ID NO: 786 - protein, 10 aa, Artificial Sequence
  Description of Artificial Sequence: Synthetic peptide
GFSIYYSSIH

SEQ ID NO: 787 - protein, 10 aa, Artificial Sequence
  Description of Artificial Sequence: Synthetic peptide
GFSISSSSIH

SEQ ID NO: 788 - protein, 10 aa, Artificial Sequence
  Description of Artificial Sequence: Synthetic peptide
GFYIYYSSIH

SEQ ID NO: 789 - protein, 10 aa, Artificial Sequence
  Description of Artificial Sequence: Synthetic peptide
GFSISSSSIH

SEQ ID NO: 790 - protein, 10 aa, Artificial Sequence
  Description of Artificial Sequence: Synthetic peptide
GFSISSSSIH

SEQ ID NO: 791 - protein, 10 aa, Artificial Sequence
  Description of Artificial Sequence: Synthetic peptide
GFSIYSSSIH

SEQ ID NO: 792 - protein, 10 aa, Artificial Sequence
  Description of Artificial Sequence: Synthetic peptide
GFSISSSSIH

SEQ ID NO: 793 - protein, 10 aa, Artificial Sequence
  Description of Artificial Sequence: Synthetic peptide
GFSISSSYIH

SEQ ID NO: 794 - protein, 10 aa, Artificial Sequence
  Description of Artificial Sequence: Synthetic peptide
GFYISSSSIH

SEQ ID NO: 795 - protein, 10 aa, Artificial Sequence
  Description of Artificial Sequence: Synthetic peptide
GFYISSYSIH

SEQ ID NO: 796 - protein, 10 aa, Artificial Sequence
  Description of Artificial Sequence: Synthetic peptide
GFSISSYSIH

SEQ ID NO: 797 - protein, 10 aa, Artificial Sequence
  Description of Artificial Sequence: Synthetic peptide
GFSIYSYSIH

SEQ ID NO: 798 - protein, 10 aa, Artificial Sequence
  Description of Artificial Sequence: Synthetic peptide
GFSISSSSIH

SEQ ID NO: 799 - protein, 10 aa, Artificial Sequence
  Description of Artificial Sequence: Synthetic peptide
GFSISSSSIH

SEQ ID NO: 800 - protein, 10 aa, Artificial Sequence
  Description of Artificial Sequence: Synthetic peptide
GFYISSYSIH

SEQ ID NO: 801 - protein, 10 aa, Artificial Sequence
  Description of Artificial Sequence: Synthetic peptide
GFSIYSYSIH

SEQ ID NO: 802 - protein, 10 aa, Artificial Sequence
  Description of Artificial Sequence: Synthetic peptide
GFSIYSSYIH

SEQ ID NO: 803 - protein, 10 aa, Artificial Sequence
  Description of Artificial Sequence: Synthetic peptide
GFYISSSSIH

SEQ ID NO: 804 - protein, 10 aa, Artificial Sequence
  Description of Artificial Sequence: Synthetic peptide
GFSIYSYSIH

SEQ ID NO: 805 - protein, 10 aa, Artificial Sequence
  Description of Artificial Sequence: Synthetic peptide
GFSISSSYIH

SEQ ID NO: 806 - protein, 10 aa, Artificial Sequence
  Description of Artificial Sequence: Synthetic peptide
GFSIYSSSIH

SEQ ID NO: 807 - protein, 10 aa, Artificial Sequence
  Description of Artificial Sequence: Synthetic peptide
GFSISSSSIH

SEQ ID NO: 808 - protein, 10 aa, Artificial Sequence
  Description of Artificial Sequence: Synthetic peptide
GFYISSSSIH

SEQ ID NO: 809 - protein, 10 aa, Artificial Sequence
  Description of Artificial Sequence: Synthetic peptide
GFYISSSSIH

SEQ ID NO: 810 - protein, 10 aa, Artificial Sequence
  Description of Artificial Sequence: Synthetic peptide
GFSISYSSIH

SEQ ID NO: 811 - protein, 10 aa, Artificial Sequence
  Description of Artificial Sequence: Synthetic peptide
GFSISSSSIH

SEQ ID NO: 812 - protein, 10 aa, Artificial Sequence
  Description of Artificial Sequence: Synthetic peptide
GFSISYSSIH

SEQ ID NO: 813 - protein, 10 aa, Artificial Sequence
  Description of Artificial Sequence: Synthetic peptide
GFSISSSSIH

SEQ ID NO: 814 - protein, 10 aa, Artificial Sequence
  Description of Artificial Sequence: Synthetic peptide
GFYISSSSIH

SEQ ID NO: 815 - protein, 10 aa, Artificial Sequence
  Description of Artificial Sequence: Synthetic peptide
GFYISSSSIH

SEQ ID NO: 816 - protein, 10 aa, Artificial Sequence
  Description of Artificial Sequence: Synthetic peptide
GFSIYSSSIH

SEQ ID NO: 817 - protein, 10 aa, Artificial Sequence
  Description of Artificial Sequence: Synthetic peptide
GFSISSSSIH

SEQ ID NO: 818 - protein, 10 aa, Artificial Sequence
  Description of Artificial Sequence: Synthetic peptide
GFYIYSSSIH

SEQ ID NO: 819 - protein, 10 aa, Artificial Sequence
  Description of Artificial Sequence: Synthetic peptide
GFSISSYYIH

SEQ ID NO: 820 - protein, 10 aa, Artificial Sequence
  Description of Artificial Sequence: Synthetic peptide
GFSISYYSIH

SEQ ID NO: 821 - protein, 10 aa, Artificial Sequence
  Description of Artificial Sequence: Synthetic peptide
GFSISSSSIH

SEQ ID NO: 822 - protein, 10 aa, Artificial Sequence
  Description of Artificial Sequence: Synthetic peptide
GFSISSSSIH

SEQ ID NO: 823 - protein, 10 aa, Artificial Sequence
  Description of Artificial Sequence: Synthetic peptide
GFSISSSYIH

SEQ ID NO: 824 - protein, 10 aa, Artificial Sequence
  Description of Artificial Sequence: Synthetic peptide
GFSISSSSIH

SEQ ID NO: 825 - protein, 10 aa, Artificial Sequence
  Description of Artificial Sequence: Synthetic peptide
GFSISSSSIH

SEQ ID NO: 826 - protein, 10 aa, Artificial Sequence
  Description of Artificial Sequence: Synthetic peptide
GFSISYSSIH

SEQ ID NO: 827 - protein, 10 aa, Artificial Sequence
  Description of Artificial Sequence: Synthetic peptide
GFYISYYSIH

SEQ ID NO: 828 - protein, 10 aa, Artificial Sequence
  Description of Artificial Sequence: Synthetic peptide
GFSISYSYIH

SEQ ID NO: 829 - protein, 10 aa, Artificial Sequence
  Description of Artificial Sequence: Synthetic peptide
GFSIYSSYIH

SEQ ID NO: 830 - protein, 10 aa, Artificial Sequence
  Description of Artificial Sequence: Synthetic peptide
GFSIYSSSIH

SEQ ID NO: 831 - protein, 10 aa, Artificial Sequence
  Description of Artificial Sequence: Synthetic peptide
GFYISSSSIH

SEQ ID NO: 832 - protein, 10 aa, Artificial Sequence
  Description of Artificial Sequence: Synthetic peptide
GFSISYSYIH

SEQ ID NO: 833 - protein, 10 aa, Artificial Sequence
  Description of Artificial Sequence: Synthetic peptide
GFYISSSSIH

SEQ ID NO: 834 - protein, 10 aa, Artificial Sequence
  Description of Artificial Sequence: Synthetic peptide
GFSIYSSYIH

SEQ ID NO: 835 - protein, 10 aa, Artificial Sequence
  Description of Artificial Sequence: Synthetic peptide
GFSISSSSIH

SEQ ID NO: 836 - protein, 10 aa, Artificial Sequence
  Description of Artificial Sequence: Synthetic peptide
GFYISSSSIH

SEQ ID NO: 837 - protein, 10 aa, Artificial Sequence
  Description of Artificial Sequence: Synthetic peptide
GFSISSSYIH

SEQ ID NO: 838 - protein, 10 aa, Artificial Sequence
  Description of Artificial Sequence: Synthetic peptide
GFYISYSSIH

SEQ ID NO: 839 - protein, 10 aa, Artificial Sequence
  Description of Artificial Sequence: Synthetic peptide
GFSIYYYSIH

SEQ ID NO: 840 - protein, 10 aa, Artificial Sequence
  Description of Artificial Sequence: Synthetic peptide
GFYISSSSIH

SEQ ID NO: 841 - protein, 10 aa, Artificial Sequence
  Description of Artificial Sequence: Synthetic peptide
GFSISSSSIH

SEQ ID NO: 842 - protein, 10 aa, Artificial Sequence
  Description of Artificial Sequence: Synthetic peptide
GFYIYYSYIH

SEQ ID NO: 843 - protein, 10 aa, Artificial Sequence
  Description of Artificial Sequence: Synthetic peptide
GFSIYYSSIH

SEQ ID NO: 844 - protein, 10 aa, Artificial Sequence
  Description of Artificial Sequence: Synthetic peptide
GFSISYYSIH

SEQ ID NO: 845 - protein, 10 aa, Artificial Sequence
  Description of Artificial Sequence: Synthetic peptide
GFYIYSSSIH

SEQ ID NO: 846 - protein, 10 aa, Artificial Sequence
  Description of Artificial Sequence: Synthetic peptide
GFYIYYSSIH

SEQ ID NO: 847 - protein, 10 aa, Artificial Sequence
  Description of Artificial Sequence: Synthetic peptide
GFYISSYYIH

SEQ ID NO: 848 - protein, 10 aa, Artificial Sequence
  Description of Artificial Sequence: Synthetic peptide
GFYISSSSIH

SEQ ID NO: 849 - protein, 10 aa, Artificial Sequence
  Description of Artificial Sequence: Synthetic peptide
GFYIYSYSIH

SEQ ID NO: 850 - protein, 10 aa, Artificial Sequence
  Description of Artificial Sequence: Synthetic peptide
GFSISYSSIH

SEQ ID NO: 851 - protein, 10 aa, Artificial Sequence
  Description of Artificial Sequence: Synthetic peptide
GFSIYYSSIH

SEQ ID NO: 852 - protein, 10 aa, Artificial Sequence
  Description of Artificial Sequence: Synthetic peptide
GFSISSSSIH

SEQ ID NO: 853 - protein, 10 aa, Artificial Sequence
  Description of Artificial Sequence: Synthetic peptide
GFSISYYSIH

SEQ ID NO: 854 - protein, 10 aa, Artificial Sequence
  Description of Artificial Sequence: Synthetic peptide
GFSISSSYIH

SEQ ID NO: 855 - protein, 10 aa, Artificial Sequence
  Description of Artificial Sequence: Synthetic peptide
GFSIYSYSIH

SEQ ID NO: 856 - protein, 10 aa, Artificial Sequence
  Description of Artificial Sequence: Synthetic peptide
GFSISSSYIH

SEQ ID NO: 857 - protein, 10 aa, Artificial Sequence
  Description of Artificial Sequence: Synthetic peptide
GFSISSYYIH

SEQ ID NO: 858 - protein, 10 aa, Artificial Sequence
  Description of Artificial Sequence: Synthetic peptide
GFSISSSYIH

SEQ ID NO: 859 - protein, 10 aa, Artificial Sequence
  Description of Artificial Sequence: Synthetic peptide
GFSISSSYIH

SEQ ID NO: 860 - protein, 10 aa, Artificial Sequence
  Description of Artificial Sequence: Synthetic peptide
GFSIYYSSIH

SEQ ID NO: 861 - protein, 10 aa, Artificial Sequence
  Description of Artificial Sequence: Synthetic peptide
GFSISYYYIH

SEQ ID NO: 862 - protein, 10 aa, Artificial Sequence
  Description of Artificial Sequence: Synthetic peptide
GFSISYSSIH

SEQ ID NO: 863 - protein, 10 aa, Artificial Sequence
  Description of Artificial Sequence: Synthetic peptide
GFSISYYSIH

SEQ ID NO: 864 - protein, 10 aa, Artificial Sequence
  Description of Artificial Sequence: Synthetic peptide
GFSISSSYIH

SEQ ID NO: 865 - protein, 10 aa, Artificial Sequence
  Description of Artificial Sequence: Synthetic peptide
GFSIYSSSIH

SEQ ID NO: 866 - protein, 10 aa, Artificial Sequence
  Description of Artificial Sequence: Synthetic peptide
GFSISSSYIH

SEQ ID NO: 867 - protein, 10 aa, Artificial Sequence
  Description of Artificial Sequence: Synthetic peptide
GFSIYYSSIH

SEQ ID NO: 868 - protein, 10 aa, Artificial Sequence
  Description of Artificial Sequence: Synthetic peptide
GFSISSSSIH

SEQ ID NO: 869 - protein, 10 aa, Artificial Sequence
  Description of Artificial Sequence: Synthetic peptide
GFSISSYSIH

SEQ ID NO: 870 - protein, 10 aa, Artificial Sequence
  Description of Artificial Sequence: Synthetic peptide
GFYISYSSIH

SEQ ID NO: 871 - protein, 10 aa, Artificial Sequence
  Description of Artificial Sequence: Synthetic peptide
GFYISSYSIH

SEQ ID NO: 872 - protein, 10 aa, Artificial Sequence
  Description of Artificial Sequence: Synthetic peptide
GFSISSSSIH

SEQ ID NO: 873 - protein, 10 aa, Artificial Sequence
  Description of Artificial Sequence: Synthetic peptide
GFSIYSSSIH

SEQ ID NO: 874 - protein, 10 aa, Artificial Sequence
  Description of Artificial Sequence: Synthetic peptide
GFSISYSSIH

SEQ ID NO: 875 - protein, 10 aa, Artificial Sequence
  Description of Artificial Sequence: Synthetic peptide
GFYISYYSIH

SEQ ID NO: 876 - protein, 10 aa, Artificial Sequence
  Description of Artificial Sequence: Synthetic peptide
GFSISYSSIH

SEQ ID NO: 877 - protein, 10 aa, Artificial Sequence
  Description of Artificial Sequence: Synthetic peptide
GFYISSSSIH

SEQ ID NO: 878 - protein, 10 aa, Artificial Sequence
  Description of Artificial Sequence: Synthetic peptide
GFSISSSSIH

SEQ ID NO: 879 - protein, 10 aa, Artificial Sequence
  Description of Artificial Sequence: Synthetic peptide
GFSISYYSIH

SEQ ID NO: 880 - protein, 10 aa, Artificial Sequence
  Description of Artificial Sequence: Synthetic peptide
GFSIYYSYIH

SEQ ID NO: 881 - protein, 10 aa, Artificial Sequence
  Description of Artificial Sequence: Synthetic peptide
GFSISYSSIH

SEQ ID NO: 882 - protein, 10 aa, Artificial Sequence
  Description of Artificial Sequence: Synthetic peptide
GFYISYSSIH

SEQ ID NO: 883 - protein, 10 aa, Artificial Sequence
  Description of Artificial Sequence: Synthetic peptide
GFSIYSSSIH

SEQ ID NO: 884 - protein, 10 aa, Artificial Sequence
  Description of Artificial Sequence: Synthetic peptide
GFSISSSSIH

SEQ ID NO: 885 - protein, 10 aa, Artificial Sequence
  Description of Artificial Sequence: Synthetic peptide
GFSISYSSIH

SEQ ID NO: 886 - protein, 10 aa, Artificial Sequence
  Description of Artificial Sequence: Synthetic peptide
GFSIYYSSIH

SEQ ID NO: 887 - protein, 10 aa, Artificial Sequence
  Description of Artificial Sequence: Synthetic peptide
GFSIYSSSIH

SEQ ID NO: 888 - protein, 10 aa, Artificial Sequence
  Description of Artificial Sequence: Synthetic peptide
GFSIYYYSIH

SEQ ID NO: 889 - protein, 17 aa, Artificial Sequence
  Description of Artificial Sequence: Synthetic peptide
SISPSSGSTSYADSVKG

SEQ ID NO: 890 - protein, 17 aa, Artificial Sequence
  Description of Artificial Sequence: Synthetic peptide
SISPYYGSTSYADSVKG

SEQ ID NO: 891 - protein, 17 aa, Artificial Sequence
  Description of Artificial Sequence: Synthetic peptide
YISPSYGYTSYADSVKG

SEQ ID NO: 892 - protein, 17 aa, Artificial Sequence
  Description of Artificial Sequence: Synthetic peptide
SIYPSSGSTYYADSVKG

SEQ ID NO: 893 - protein, 17 aa, Artificial Sequence
  Description of Artificial Sequence: Synthetic peptide
SIYPSSGYTSYADSVKG

SEQ ID NO: 894 - protein, 17 aa, Artificial Sequence
  Description of Artificial Sequence: Synthetic peptide
SISPYSGSTYYADSVKG

SEQ ID NO: 895 - protein, 17 aa, Artificial Sequence
  Description of Artificial Sequence: Synthetic peptide
SISPSSGSTYYADSVKG

SEQ ID NO: 896 - protein, 17 aa, Artificial Sequence
  Description of Artificial Sequence: Synthetic peptide
SISPYYGSTYYADSVKG

SEQ ID NO: 897 - protein, 17 aa, Artificial Sequence
  Description of Artificial Sequence: Synthetic peptide
SISPSSGSTSYADSVKG

SEQ ID NO: 898 - protein, 17 aa, Artificial Sequence
  Description of Artificial Sequence: Synthetic peptide
SIYPSSGYTSYADSVKG

SEQ ID NO: 899 - protein, 17 aa, Artificial Sequence
  Description of Artificial Sequence: Synthetic peptide
SISPSSGYTYYADSVKG

SEQ ID NO: 900 - protein, 17 aa, Artificial Sequence
  Description of Artificial Sequence: Synthetic peptide
SISPYSGYTSYADSVKG

SEQ ID NO: 901 - protein, 17 aa, Artificial Sequence
  Description of Artificial Sequence: Synthetic peptide
SISPYYGSTSYADSVKG

SEQ ID NO: 902 - protein, 17 aa, Artificial Sequence
  Description of Artificial Sequence: Synthetic peptide
SIYPYYGYTYYADSVKG

SEQ ID NO: 903 - protein, 17 aa, Artificial Sequence
  Description of Artificial Sequence: Synthetic peptide
SISPSYGYTSYADSVKG

SEQ ID NO: 904 - protein, 17 aa, Artificial Sequence
  Description of Artificial Sequence: Synthetic peptide
SISPYSGSTSYADSVKG

SEQ ID NO: 905 - protein, 17 aa, Artificial Sequence
  Description of Artificial Sequence: Synthetic peptide
SISPSYGYTSYADSVKG

SEQ ID NO: 906 - protein, 17 aa, Artificial Sequence
  Description of Artificial Sequence: Synthetic peptide
SIYPSSGSTSYADSVKG

SEQ ID NO: 907 - protein, 17 aa, Artificial Sequence
  Description of Artificial Sequence: Synthetic peptide
SISPSSGSTYYADSVKG

SEQ ID NO: 908 - protein, 17 aa, Artificial Sequence
  Description of Artificial Sequence: Synthetic peptide
YISPYSGSTSYADSVKG

SEQ ID NO: 909 - protein, 17 aa, Artificial Sequence
  Description of Artificial Sequence: Synthetic peptide
SISPSYGSTYYADSVKG

SEQ ID NO: 910 - protein, 17 aa, Artificial Sequence
  Description of Artificial Sequence: Synthetic peptide
SISPSSGYTSYADSVKG

SEQ ID NO: 911 - protein, 17 aa, Artificial Sequence
  Description of Artificial Sequence: Synthetic peptide
SISPYYGYTSYADSVKG

SEQ ID NO: 912 - protein, 17 aa, Artificial Sequence
  Description of Artificial Sequence: Synthetic peptide
SISPYYGSTSYADSVKG

SEQ ID NO: 913 - protein, 17 aa, Artificial Sequence
  Description of Artificial Sequence: Synthetic peptide
SISPYSGSTSYADSVKG

SEQ ID NO: 914 - protein, 17 aa, Artificial Sequence
  Description of Artificial Sequence: Synthetic peptide
SISPSYGYTSYADSVKG

SEQ ID NO: 915 - protein, 17 aa, Artificial Sequence
  Description of Artificial Sequence: Synthetic peptide
SISPYYGYTSYADSVKG

SEQ ID NO: 916 - protein, 17 aa, Artificial Sequence
  Description of Artificial Sequence: Synthetic peptide
SISPYSGSTYYADSVKG

SEQ ID NO: 917 - protein, 17 aa, Artificial Sequence
  Description of Artificial Sequence: Synthetic peptide
YISPSSGSTYYADSVKG

SEQ ID NO: 918 - protein, 17 aa, Artificial Sequence
  Description of Artificial Sequence: Synthetic peptide
SISPSYGYTSYADSVKG

SEQ ID NO: 919 - protein, 17 aa, Artificial Sequence
  Description of Artificial Sequence: Synthetic peptide
SISPYYGSTSYADSVKG

SEQ ID NO: 920 - protein, 17 aa, Artificial Sequence
  Description of Artificial Sequence: Synthetic peptide
SISPSSGYTSYADSVKG

SEQ ID NO: 921 - protein, 17 aa, Artificial Sequence
  Description of Artificial Sequence: Synthetic peptide
SISPSYGSTSYADSVKG

SEQ ID NO: 922 - protein, 17 aa, Artificial Sequence
  Description of Artificial Sequence: Synthetic peptide
YISPSSGSTSYADSVKG

SEQ ID NO: 923 - protein, 17 aa, Artificial Sequence
  Description of Artificial Sequence: Synthetic peptide
SISPYYGSTSYADSVKG

SEQ ID NO: 924 - protein, 17 aa, Artificial Sequence
  Description of Artificial Sequence: Synthetic peptide
SISPSYGYTSYADSVKG

SEQ ID NO: 925 - protein, 17 aa, Artificial Sequence
  Description of Artificial Sequence: Synthetic peptide
YISPYYGYTYYADSVKG

SEQ ID NO: 926 - protein, 17 aa, Artificial Sequence
  Description of Artificial Sequence: Synthetic peptide
SISPYYGSTSYADSVKG

SEQ ID NO: 927 - protein, 17 aa, Artificial Sequence
  Description of Artificial Sequence: Synthetic peptide
SISPYYGYTYYADSVKG

SEQ ID NO: 928 - protein, 17 aa, Artificial Sequence
  Description of Artificial Sequence: Synthetic peptide
SIYPSSGSTSYADSVKG

SEQ ID NO: 929 - protein, 17 aa, Artificial Sequence
  Description of Artificial Sequence: Synthetic peptide
SIYPSSGYTSYADSVKG

SEQ ID NO: 930 - protein, 17 aa, Artificial Sequence
  Description of Artificial Sequence: Synthetic peptide
SISPYYGSTSYADSVKG

SEQ ID NO: 931 - protein, 17 aa, Artificial Sequence
  Description of Artificial Sequence: Synthetic peptide
SISPYYGSTYYADSVKG

SEQ ID NO: 932 - protein, 17 aa, Artificial Sequence
  Description of Artificial Sequence: Synthetic peptide
SISPSSGSTYYADSVKG

SEQ ID NO: 933 - protein, 17 aa, Artificial Sequence
  Description of Artificial Sequence: Synthetic peptide
YISPYSGYTSYADSVKG

SEQ ID NO: 934 - protein, 17 aa, Artificial Sequence
  Description of Artificial Sequence: Synthetic peptide
SIYPYYGSTSYADSVKG

SEQ ID NO: 935 - protein, 17 aa, Artificial Sequence
  Description of Artificial Sequence: Synthetic peptide
YISPSYGSTSYADSVKG

SEQ ID NO: 936 - protein, 17 aa, Artificial Sequence
  Description of Artificial Sequence: Synthetic peptide
SISPSSGSTSYADSVKG

SEQ ID NO: 937 - protein, 17 aa, Artificial Sequence
  Description of Artificial Sequence: Synthetic peptide
SIYPSYGSTYYADSVKG

SEQ ID NO: 938 - protein, 17 aa, Artificial Sequence
  Description of Artificial Sequence: Synthetic peptide
SISPSSGSTSYADSVKG

SEQ ID NO: 939 - protein, 17 aa, Artificial Sequence
  Description of Artificial Sequence: Synthetic peptide
SIYPSSGYTSYADSVKG

SEQ ID NO: 940 - protein, 17 aa, Artificial Sequence
  Description of Artificial Sequence: Synthetic peptide
SISPSSGSTSYADSVKG

SEQ ID NO: 941 - protein, 17 aa, Artificial Sequence
  Description of Artificial Sequence: Synthetic peptide
SIYPSSGSTYYADSVKG

SEQ ID NO: 942 - protein, 17 aa, Artificial Sequence
  Description of Artificial Sequence: Synthetic peptide
YIYPSSGYTSYADSVKG

SEQ ID NO: 943 - protein, 17 aa, Artificial Sequence
  Description of Artificial Sequence: Synthetic peptide
SISPYYGSTSYADSVKG

SEQ ID NO: 944 - protein, 17 aa, Artificial Sequence
  Description of Artificial Sequence: Synthetic peptide
SISPSSGSTYYADSVKG

SEQ ID NO: 945 - protein, 17 aa, Artificial Sequence
  Description of Artificial Sequence: Synthetic peptide
SISPSYGSTSYADSVKG

SEQ ID NO: 946 - protein, 17 aa, Artificial Sequence
  Description of Artificial Sequence: Synthetic peptide
SISPYYGSTSYADSVKG

SEQ ID NO: 947 - protein, 17 aa, Artificial Sequence
  Description of Artificial Sequence: Synthetic peptide
SISPYSGYTYYADSVKG

SEQ ID NO: 948 - protein, 17 aa, Artificial Sequence
  Description of Artificial Sequence: Synthetic peptide
SIYPSYGYTSYADSVKG

SEQ ID NO: 949 - protein, 17 aa, Artificial Sequence
  Description of Artificial Sequence: Synthetic peptide
SISPSYGYTSYADSVKG

SEQ ID NO: 950 - protein, 17 aa, Artificial Sequence
  Description of Artificial Sequence: Synthetic peptide
YISPSSGYTSYADSVKG

SEQ ID NO: 951 - protein, 17 aa, Artificial Sequence
  Description of Artificial Sequence: Synthetic peptide
YISPYYGSTSYADSVKG

SEQ ID NO: 952 - protein, 17 aa, Artificial Sequence
  Description of Artificial Sequence: Synthetic peptide
YISPSSGYTYYADSVKG

SEQ ID NO: 953 - protein, 17 aa, Artificial Sequence
  Description of Artificial Sequence: Synthetic peptide
SISPSYGYTSYADSVKG

SEQ ID NO: 954 - protein, 17 aa, Artificial Sequence
  Description of Artificial Sequence: Synthetic peptide
YISPYSGYTYYADSVKG

SEQ ID NO: 955 - protein, 17 aa, Artificial Sequence
  Description of Artificial Sequence: Synthetic peptide
SISPYYGYTSYADSVKG

SEQ ID NO: 956 - protein, 17 aa, Artificial Sequence
  Description of Artificial Sequence: Synthetic peptide
SISPSSGYTSYADSVKG

SEQ ID NO: 957 - protein, 17 aa, Artificial Sequence
  Description of Artificial Sequence: Synthetic peptide
SISPYYGYTYYADSVKG

SEQ ID NO: 958 - protein, 17 aa, Artificial Sequence
  Description of Artificial Sequence: Synthetic peptide
SIYPSYGSTSYADSVKG

SEQ ID NO: 959 - protein, 17 aa, Artificial Sequence
  Description of Artificial Sequence: Synthetic peptide
SIYPSSGSTSYADSVKG

SEQ ID NO: 960 - protein, 17 aa, Artificial Sequence
  Description of Artificial Sequence: Synthetic peptide
SISPSYGSTSYADSVKG

SEQ ID NO: 961 - protein, 17 aa, Artificial Sequence
  Description of Artificial Sequence: Synthetic peptide
SISPYYGYTSYADSVKG

SEQ ID NO: 962 - protein, 17 aa, Artificial Sequence
  Description of Artificial Sequence: Synthetic peptide
YIYPYYGYTSYADSVKG

SEQ ID NO: 963 - protein, 17 aa, Artificial Sequence
  Description of Artificial Sequence: Synthetic peptide
SISPSSGSTYYADSVKG

SEQ ID NO: 964 - protein, 17 aa, Artificial Sequence
  Description of Artificial Sequence: Synthetic peptide
YISPYYGYTYYADSVKG

SEQ ID NO: 965 - protein, 17 aa, Artificial Sequence
  Description of Artificial Sequence: Synthetic peptide
SISPYSGSTYYADSVKG

SEQ ID NO: 966 - protein, 17 aa, Artificial Sequence
  Description of Artificial Sequence: Synthetic peptide
SISPYSGYTYYADSVKG

SEQ ID NO: 967 - protein, 17 aa, Artificial Sequence
  Description of Artificial Sequence: Synthetic peptide
SIYPYYGYTSYADSVKG

SEQ ID NO: 968 - protein, 17 aa, Artificial Sequence
  Description of Artificial Sequence: Synthetic peptide
SIYPYSGSTSYADSVKG

SEQ ID NO: 969 - protein, 17 aa, Artificial Sequence
  Description of Artificial Sequence: Synthetic peptide
SISPYYGSTSYADSVKG

SEQ ID NO: 970 - protein, 17 aa, Artificial Sequence
  Description of Artificial Sequence: Synthetic peptide
YISPSSGYTSYADSVKG

SEQ ID NO: 971 - protein, 17 aa, Artificial Sequence
  Description of Artificial Sequence: Synthetic peptide
YISPYSGSTYYADSVKG

SEQ ID NO: 972 - protein, 17 aa, Artificial Sequence
  Description of Artificial Sequence: Synthetic peptide
SISPSYGSTYYADSVKG

SEQ ID NO: 973 - protein, 17 aa, Artificial Sequence
  Description of Artificial Sequence: Synthetic peptide
SISPSSGYTSYADSVKG

SEQ ID NO: 974 - protein, 17 aa, Artificial Sequence
  Description of Artificial Sequence: Synthetic peptide
YIYPYSGSTSYADSVKG

SEQ ID NO: 975 - protein, 17 aa, Artificial Sequence
  Description of Artificial Sequence: Synthetic peptide
SIYPSYGSTYYADSVKG

SEQ ID NO: 976 - protein, 17 aa, Artificial Sequence
  Description of Artificial Sequence: Synthetic peptide
SIYPSSGYTSYADSVKG

SEQ ID NO: 977 - protein, 17 aa, Artificial Sequence
  Description of Artificial Sequence: Synthetic peptide
SIYPSYGYTSYADSVKG

SEQ ID NO: 978 - protein, 17 aa, Artificial Sequence
  Description of Artificial Sequence: Synthetic peptide
YISPSSGSTSYADSVKG

SEQ ID NO: 979 - protein, 17 aa, Artificial Sequence
  Description of Artificial Sequence: Synthetic peptide
SISPSSGYTSYADSVKG

SEQ ID NO: 980 - protein, 17 aa, Artificial Sequence
  Description of Artificial Sequence: Synthetic peptide
YISPYSGYTYYADSVKG

SEQ ID NO: 981 - protein, 17 aa, Artificial Sequence
  Description of Artificial Sequence: Synthetic peptide
SIYPYYGYTSYADSVKG

SEQ ID NO: 982 - protein, 17 aa, Artificial Sequence
  Description of Artificial Sequence: Synthetic peptide
SIYPYSGYTYYADSVKG

SEQ ID NO: 983 - protein, 17 aa, Artificial Sequence
  Description of Artificial Sequence: Synthetic peptide
SISPSYGYTYYADSVKG

SEQ ID NO: 984 - protein, 17 aa, Artificial Sequence
  Description of Artificial Sequence: Synthetic peptide
SIYPSYGSTSYADSVKG

SEQ ID NO: 985 - protein, 17 aa, Artificial Sequence
  Description of Artificial Sequence: Synthetic peptide
YISPYSGYTSYADSVKG

SEQ ID NO: 986 - protein, 17 aa, Artificial Sequence
  Description of Artificial Sequence: Synthetic peptide
SISPYFGSTSYADSVKG

SEQ ID NO: 987 - protein, 17 aa, Artificial Sequence
  Description of Artificial Sequence: Synthetic peptide
SISPFYGYTYYADSVKG

SEQ ID NO: 988 - protein, 17 aa, Artificial Sequence
  Description of Artificial Sequence: Synthetic peptide
SISPSSGSTSYADSVKG

SEQ ID NO: 989 - protein, 17 aa, Artificial Sequence
  Description of Artificial Sequence: Synthetic peptide
SIYPYSGSTYYADSVKG

SEQ ID NO: 990 - protein, 17 aa, Artificial Sequence
  Description of Artificial Sequence: Synthetic peptide
SIYPYFGSTSYADSVKG

SEQ ID NO: 991 - protein, 17 aa, Artificial Sequence
  Description of Artificial Sequence: Synthetic peptide
SISPSYGSTYYADSVKG

SEQ ID NO: 992 - protein, 17 aa, Artificial Sequence
  Description of Artificial Sequence: Synthetic peptide
YISPSSGSTSYADSVKG

SEQ ID NO: 993 - protein, 17 aa, Artificial Sequence
  Description of Artificial Sequence: Synthetic peptide
SISPSSGSTSYADSVKG

SEQ ID NO: 994 - protein, 18 aa, Artificial Sequence
  Description of Artificial Sequence: Synthetic peptide
YYYYYYYYYYYGSYGLDY

SEQ ID NO: 995 - protein, 18 aa, Artificial Sequence
  Description of Artificial Sequence: Synthetic peptide
YYSYYYYYYYYGGYGLDY

SEQ ID NO: 996 - protein, 18 aa, Artificial Sequence
  Description of Artificial Sequence: Synthetic peptide
YYRYYYSYYYYGYYGFDY

SEQ ID NO: 997 - protein, 18 aa, Artificial Sequence
  Description of Artificial Sequence: Synthetic peptide
YYRYYYRYYYYGYYGLDY

SEQ ID NO: 998 - protein, 18 aa, Artificial Sequence
  Description of Artificial Sequence: Synthetic peptide
YSYYYYYYYYYGYYGLDY

SEQ ID NO: 999 - protein, 18 aa, Artificial Sequence
  Description of Artificial Sequence: Synthetic peptide
YSYYYYYYYYYGYYGMDY

SEQ ID NO: 1000 - protein, 18 aa, Artificial Sequence
  Description of Artificial Sequence: Synthetic peptide
YSYYYYYYYYYGYYGLDY

SEQ ID NO: 1001 - protein, 18 aa, Artificial Sequence
  Description of Artificial Sequence: Synthetic peptide
YSYYYYYYYYYGSYGLDY

SEQ ID NO: 1002 - protein, 18 aa, Artificial Sequence
  Description of Artificial Sequence: Synthetic peptide
YSYYYYYYYYYGSYGMDY

SEQ ID NO: 1003 - protein, 18 aa, Artificial Sequence
  Description of Artificial Sequence: Synthetic peptide
YSYYYYYYYYYGSYGLDY

SEQ ID NO: 1004 - protein, 18 aa, Artificial Sequence
  Description of Artificial Sequence: Synthetic peptide
YSYYYYYYYYYGSYGFDY

SEQ ID NO: 1005 - protein, 18 aa, Artificial Sequence
  Description of Artificial Sequence: Synthetic peptide
YSYYYYYYYYYGSYAMDY

SEQ ID NO: 1006 - protein, 18 aa, Artificial Sequence
  Description of Artificial Sequence: Synthetic peptide
YSYYYYYYYYYGGYGMDY

SEQ ID NO: 1007 - protein, 18 aa, Artificial Sequence
  Description of Artificial Sequence: Synthetic peptide
YSYYYYYSYYYGYYGMDY

SEQ ID NO: 1008 - protein, 18 aa, Artificial Sequence
  Description of Artificial Sequence: Synthetic peptide
YSYYYYYSYYYGSYGLDY

SEQ ID NO: 1009 - protein, 18 aa, Artificial Sequence
  Description of Artificial Sequence: Synthetic peptide
YSYYYYSYYYYGGYGLDY

SEQ ID NO: 1010 - protein, 18 aa, Artificial Sequence
  Description of Artificial Sequence: Synthetic peptide
YSYYYYGYYYYGYYGLDY

SEQ ID NO: 1011 - protein, 18 aa, Artificial Sequence
  Description of Artificial Sequence: Synthetic peptide
YSYYYYGYYYYGYYGFDY

SEQ ID NO: 1012 - protein, 18 aa, Artificial Sequence
  Description of Artificial Sequence: Synthetic peptide
YSYYYYGYYYYGYYGLDY

SEQ ID NO: 1013 - protein, 18 aa, Artificial Sequence
  Description of Artificial Sequence: Synthetic peptide
YSYYYYGYYYYGSYGLDY

SEQ ID NO: 1014 - protein, 18 aa, Artificial Sequence
  Description of Artificial Sequence: Synthetic peptide
YSYYYYGYYYYGYYGMDY

SEQ ID NO: 1015 - protein, 18 aa, Artificial Sequence
  Description of Artificial Sequence: Synthetic peptide
YSYYSYYYYYYGSYGLDY

SEQ ID NO: 1016 - protein, 18 aa, Artificial Sequence
  Description of Artificial Sequence: Synthetic peptide
YSYSYYYSYYYYSYGLDY

SEQ ID NO: 1017 - protein, 18 aa, Artificial Sequence
  Description of Artificial Sequence: Synthetic peptide
YSYGYYYYYYYYYYGFDY

SEQ ID NO: 1018 - protein, 18 aa, Artificial Sequence
  Description of Artificial Sequence: Synthetic peptide
YSSYYYYYYYYGYYGFDY

SEQ ID NO: 1019 - protein, 18 aa, Artificial Sequence
  Description of Artificial Sequence: Synthetic peptide
YSSYYYYYYYYGYYGFDY

SEQ ID NO: 1020 - protein, 18 aa, Artificial Sequence
  Description of Artificial Sequence: Synthetic peptide
YSSYYYYYYYYGYYGLDY

SEQ ID NO: 1021 - protein, 18 aa, Artificial Sequence
  Description of Artificial Sequence: Synthetic peptide
YSSYYYYYYYYGYYGLDY

SEQ ID NO: 1022 - protein, 18 aa, Artificial Sequence
  Description of Artificial Sequence: Synthetic peptide
YSSYYYYYYYYGYYGFDY

SEQ ID NO: 1023 - protein, 18 aa, Artificial Sequence
  Description of Artificial Sequence: Synthetic peptide
YSSYYYGYYYYGYYGLDY

SEQ ID NO: 1024 - protein, 18 aa, Artificial Sequence
  Description of Artificial Sequence: Synthetic peptide
YSSYYYGYYYYGYYGMDY

SEQ ID NO: 1025 - protein, 18 aa, Artificial Sequence
  Description of Artificial Sequence: Synthetic peptide
YSRYYYYYYYYGYYGLDY

SEQ ID NO: 1026 - protein, 18 aa, Artificial Sequence
  Description of Artificial Sequence: Synthetic peptide
YSRYYYGRYYYGYYGLDY

SEQ ID NO: 1027 - protein, 18 aa, Artificial Sequence
  Description of Artificial Sequence: Synthetic peptide
YRRRYYYSYYYYSYGMDY

SEQ ID NO: 1028 - protein, 18 aa, Artificial Sequence
  Description of Artificial Sequence: Synthetic peptide
YGYYYYYSYYYGSYGLDY

SEQ ID NO: 1029 - protein, 18 aa, Artificial Sequence
  Description of Artificial Sequence: Synthetic peptide
YGYYYYYYYYYGGYGLDY

SEQ ID NO: 1030 - protein, 18 aa, Artificial Sequence
  Description of Artificial Sequence: Synthetic peptide
YGYYYYYRYYYGYYGMDY

SEQ ID NO: 1031 - protein, 18 aa, Artificial Sequence
  Description of Artificial Sequence: Synthetic peptide
YGYYYYYYYYYGSYGFDY

SEQ ID NO: 1032 - protein, 18 aa, Artificial Sequence
  Description of Artificial Sequence: Synthetic peptide
YGYYYYYYYYYGSYGLDY

SEQ ID NO: 1033 - protein, 18 aa, Artificial Sequence
  Description of Artificial Sequence: Synthetic peptide
YGYYYYYYYYYGSYGLDY

SEQ ID NO: 1034 - protein, 18 aa, Artificial Sequence
  Description of Artificial Sequence: Synthetic peptide
YGYYYYYYYYYGSYAFDY

SEQ ID NO: 1035 - protein, 18 aa, Artificial Sequence
  Description of Artificial Sequence: Synthetic peptide
YGYYYYGSYYYGSYGLDY

SEQ ID NO: 1036 - protein, 18 aa, Artificial Sequence
  Description of Artificial Sequence: Synthetic peptide
YGRYSYGSYYYGRYGFDY

SEQ ID NO: 1037 - protein, 18 aa, Artificial Sequence
  Description of Artificial Sequence: Synthetic peptide
YGRRYYYYYYYYSYAFDY

SEQ ID NO: 1038 - protein, 18 aa, Artificial Sequence
  Description of Artificial Sequence: Synthetic peptide
SYGGSYSYYYYYYSGFDY

SEQ ID NO: 1039 - protein, 18 aa, Artificial Sequence
  Description of Artificial Sequence: Synthetic peptide
SSYYYYYYYYYGSYGLDY

SEQ ID NO: 1040 - protein, 18 aa, Artificial Sequence
  Description of Artificial Sequence: Synthetic peptide
SSYYYYYYYYYGSYGMDY

SEQ ID NO: 1041 - protein, 18 aa, Artificial Sequence
  Description of Artificial Sequence: Synthetic peptide
SSYYYYYYYYYGSYGLDY

SEQ ID NO: 1042 - protein, 18 aa, Artificial Sequence
  Description of Artificial Sequence: Synthetic peptide
SSYYYYYYYYYYSRGLDY

SEQ ID NO: 1043 - protein, 18 aa, Artificial Sequence
  Description of Artificial Sequence: Synthetic peptide
SSYYYYYYYYYGSYGLDY

SEQ ID NO: 1044 - protein, 18 aa, Artificial Sequence
  Description of Artificial Sequence: Synthetic peptide
SSYYYYGYYYYGSYGLDY

SEQ ID NO: 1045 - protein, 18 aa, Artificial Sequence
  Description of Artificial Sequence: Synthetic peptide
SSYSYYYYYYYYSYGFDY

SEQ ID NO: 1046 - protein, 18 aa, Artificial Sequence
  Description of Artificial Sequence: Synthetic peptide
SGYYYYYYYYYGSYGLDY

SEQ ID NO: 1047 - protein, 18 aa, Artificial Sequence
  Description of Artificial Sequence: Synthetic peptide
GSYYYYYYYYYGYYGLDY

SEQ ID NO: 1048 - protein, 19 aa, Artificial Sequence
  Description of Artificial Sequence: Synthetic peptide
YSYYYSYYYYYYGSYGFDY

SEQ ID NO: 1049 - protein, 19 aa, Artificial Sequence
  Description of Artificial Sequence: Synthetic peptide
YSSYYGYYYYYYGYYGLDY

SEQ ID NO: 1050 - protein, 19 aa, Artificial Sequence
  Description of Artificial Sequence: Synthetic peptide
YSSYYGYYYYYYGYYGLDY

SEQ ID NO: 1051 - protein, 19 aa, Artificial Sequence
  Description of Artificial Sequence: Synthetic peptide
YSRYYGYGYYYYGYYGFDY

SEQ ID NO: 1052 - protein, 10 aa, Artificial Sequence
  Description of Artificial Sequence: Synthetic peptide
SRYGRYGMDY

SEQ ID NO: 1053 - protein, 11 aa, Artificial Sequence
  Description of Artificial Sequence: Synthetic peptide
SSYYYRRGIDY

SEQ ID NO: 1054 - protein, 12 aa, Artificial Sequence
  Description of Artificial Sequence: Synthetic peptide
RSYRRYRRGMDY

SEQ ID NO: 1055 - protein, 13 aa, Artificial Sequence
  Description of Artificial Sequence: Synthetic peptide
SRRYYRYSYGFDY

SEQ ID NO: 1056 - protein, 13 aa, Artificial Sequence
  Description of Artificial Sequence: Synthetic peptide
SYSSYSRRYGMDY

SEQ ID NO: 1057 - protein, 16 aa, Artificial Sequence
  Description of Artificial Sequence: Synthetic peptide
SRRGGYSRSSSRGLDY

SEQ ID NO: 1058 - protein, 16 aa, Artificial Sequence
  Description of Artificial Sequence: Synthetic peptide
RSYYRYYYRSYSALDY

SEQ ID NO: 1059 - protein, 16 aa, Artificial Sequence
  Description of Artificial Sequence: Synthetic peptide
YYGGYYYYSYYSGLDY

SEQ ID NO: 1060 - protein, 17 aa, Artificial Sequence
  Description of Artificial Sequence: Synthetic peptide
YYGRSGRYRGRRYGFDY

SEQ ID NO: 1061 - protein, 17 aa, Artificial Sequence
  Description of Artificial Sequence: Synthetic peptide
YSYYYSYYYRGSYGLDY

SEQ ID NO: 1062 - protein, 17 aa, Artificial Sequence
  Description of Artificial Sequence: Synthetic peptide
YSYYYYYSYYYYGAMDY

SEQ ID NO: 1063 - protein, 17 aa, Artificial Sequence
  Description of Artificial Sequence: Synthetic peptide
YSRYYRSYYYGYRGLDY

SEQ ID NO: 1064 - protein, 17 aa, Artificial Sequence
  Description of Artificial Sequence: Synthetic peptide
YRYSYSYYYRYSYGLDY

SEQ ID NO: 1065 - protein, 17 aa, Artificial Sequence
  Description of Artificial Sequence: Synthetic peptide
YRYYYYYYYYGSYGLDY

SEQ ID NO: 1066 - protein, 17 aa, Artificial Sequence
  Description of Artificial Sequence: Synthetic peptide
SRGYYSYSYSRYRGFDY

SEQ ID NO: 1067 - protein, 19 aa, Artificial Sequence
  Description of Artificial Sequence: Synthetic peptide
SYRRSSYYSRYRRSSGFDY

SEQ ID NO: 1068 - protein, 19 aa, Artificial Sequence
  Description of Artificial Sequence: Synthetic peptide
SGYYYRYYYYRRSYGGFDY

SEQ ID NO: 1069 - protein, 19 aa, Artificial Sequence
  Description of Artificial Sequence: Synthetic peptide
SGRYGRGYYSGRRYRGIDY

SEQ ID NO: 1070 - protein, 19 aa, Artificial Sequence
  Description of Artificial Sequence: Synthetic peptide
RGSYYGYGYYYYGYYGLDY

SEQ ID NO: 1071 - protein, 20 aa, Artificial Sequence
  Description of Artificial Sequence: Synthetic peptide
SRRYYSYSYSRYYYSRGFDY

SEQ ID NO: 1072 - protein, 20 aa, Artificial Sequence
  Description of Artificial Sequence: Synthetic peptide
SGYSYYSYYYSYYYSYGMDY

SEQ ID NO: 1073 - protein, 21 aa, Artificial Sequence
  Description of Artificial Sequence: Synthetic peptide
YSYYYSYGYYYYYYYGYGLDY

SEQ ID NO: 1074 - protein, 21 aa, Artificial Sequence
  Description of Artificial Sequence: Synthetic peptide
SYSYYYRYYYYYSSYSYGFDY

SEQ ID NO: 1075 - protein, 21 aa, Artificial Sequence
  Description of Artificial Sequence: Synthetic peptide
RYYSSSRYYGYYYYYYSGFDY

SEQ ID NO: 1076 - protein, 20 aa, Artificial Sequence
  Description of Artificial Sequence: Synthetic peptide
YGYYYSYYGGYYSYSYAMDY

SEQ ID NO: 1077 - protein, 20 aa, Artificial Sequence
  Description of Artificial Sequence: Synthetic peptide
YGYYYSYYGYYYSYSYAMDY

SEQ ID NO: 1078 - protein, 21 aa, Artificial Sequence
  Description of Artificial Sequence: Synthetic peptide
YYSYGRYYGYYYSYGYYGLDY

SEQ ID NO: 1079 - protein, 21 aa, Artificial Sequence
  Description of Artificial Sequence: Synthetic peptide
YSYYYSYYGYYYSYGYYGMDY

SEQ ID NO: 1080 - protein, 21 aa, Artificial Sequence
  Description of Artificial Sequence: Synthetic peptide
YSSYYSSYGYYRSYGYYGLDY

SEQ ID NO: 1081 - protein, 21 aa, Artificial Sequence
  Description of Artificial Sequence: Synthetic peptide
YGYYYGYYGRYYSYGSYGMDY

SEQ ID NO: 1082 - protein, 21 aa, Artificial Sequence
  Description of Artificial Sequence: Synthetic peptide
SYGYRSRSGYYYYYRYRGFDY

SEQ ID NO: 1083 - protein, 21 aa, Artificial Sequence
  Description of Artificial Sequence: Synthetic peptide
SSRYYRYYGRYYSYYYSGMDY

SEQ ID NO: 1084 - protein, 10 aa, Artificial Sequence
  Description of Artificial Sequence: Synthetic peptide
GVYRYYAIDY

SEQ ID NO: 1085 - protein, 13 aa, Artificial Sequence
  Description of Artificial Sequence: Synthetic peptide
SRRYTMSYYGLDY

SEQ ID NO: 1086 - protein, 15 aa, Artificial Sequence
  Description of Artificial Sequence: Synthetic peptide
RSWSYYGYYGSGIDY

SEQ ID NO: 1087 - protein, 16 aa, Artificial Sequence
  Description of Artificial Sequence: Synthetic peptide
RFVSHRGRYLYYGMDY

SEQ ID NO: 1088 - protein, 16 aa, Artificial Sequence
  Description of Artificial Sequence: Synthetic peptide
KRRYRYSSRAYKGFDY

SEQ ID NO: 1089 - protein, 17 aa, Artificial Sequence
  Description of Artificial Sequence: Synthetic peptide
SYQGSYYRRRYYRGMDY

SEQ ID NO: 1090 - protein, 17 aa, Artificial Sequence
  Description of Artificial Sequence: Synthetic peptide
RASRRRYERSYYMGLDY

SEQ ID NO: 1091 - protein, 18 aa, Artificial Sequence
  Description of Artificial Sequence: Synthetic peptide
YSYYYYYSYYYGSYGFDY

SEQ ID NO: 1092 - protein, 18 aa, Artificial Sequence
  Description of Artificial Sequence: Synthetic peptide
YSGGYYRRYGGGYRAFDY

SEQ ID NO: 1093 - protein, 18 aa, Artificial Sequence
  Description of Artificial Sequence: Synthetic peptide
SKRYYYRFYYYGYYGMDY

SEQ ID NO: 1094 - protein, 21 aa, Artificial Sequence
  Description of Artificial Sequence: Synthetic peptide
YYRYFQRYGSYWYYGYYGFDY

SEQ ID NO: 1095 - protein, 21 aa, Artificial Sequence
  Description of Artificial Sequence: Synthetic peptide
YGRYYYYSSYGSYYRGRGMDY

SEQ ID NO: 1096 - protein, 21 aa, Artificial Sequence
  Description of Artificial Sequence: Synthetic peptide
SHKYGRYIGRYYSYGYMGMDY

SEQ ID NO: 1097 - protein, 21 aa, Artificial Sequence
  Description of Artificial Sequence: Synthetic peptide
RRSYSSYVGYYRSYYSMGFDY

SEQ ID NO: 1098 - protein, 21 aa, Artificial Sequence
  Description of Artificial Sequence: Synthetic peptide
KSYEYVSYGRYSSYYSYGFDY

SEQ ID NO: 1099 - protein, 23 aa, Homo sapeins
DIQMTQSPSSLSASVGDRVTITC

SEQ ID NO: 1100 - protein, 15 aa, Homo sapeins
WYQQKPGKAPKLLIY

SEQ ID NO: 1101 - protein, 32 aa, Homo sapeins
GVPSRFSGSRSGTDFTLTISSLQPEDFATYYC

SEQ ID NO: 1102 - protein, 10 aa, Homo sapeins
FGQGTKVEIK

SEQ ID NO: 1103 - protein, 25 aa, Homo sapeins [sequence omitted]

SEQ ID NO: 1104 - protein, 13 aa, Homo sapeins
WVRQAPGKGLEWV

SEQ ID NO: 1105 - protein, 30 aa, Homo sapeins
RFTISADTSKNTAYLQMNSLRAEDTAVYYC

SEQ ID NO: 1106 - protein, 11 aa, Homo sapeins
WGQGTLVTVSS

SEQ ID NO: 1107 - protein, 23 aa, Homo sapeins
DIQMTQSPSSLSASVGDRVTITC

SEQ ID NO: 1108 - protein, 15 aa, Homo sapeins
WYQQKPGKAPKLLIY

SEQ ID NO: 1109 - protein, 32 aa, Homo sapeins
GVPSRFSGSGSGTDFTLTISSLQPEDFATYYC

SEQ ID NO: 1110 - protein, 10 aa, Homo sapeins
FGQGTKVEIK

SEQ ID NO: 1111 - protein, 25 aa, Homo sapeins [sequence omitted]

SEQ ID NO: 1112 - protein, 13 aa, Homo sapeins
WVRQAPGKGLEWV

SEQ ID NO: 1113 - protein, 30 aa, Homo sapeins
RFTISRDNSKNTLYLQMNSLRAEDTAVYYC

SEQ ID NO: 1114 - protein, 11 aa, Homo sapeins
WGQGTLVTVSS

SEQ ID NO: 1115 - DNA, 54 bp, Artificial Sequence
  Description of Artificial Sequence: Synthetic oligonucleotide
gtctattattgtgctcgckctkctkctkctgstwtkgactactggggtcaagga

SEQ ID NO: 1116 - DNA, 57 bp, Artificial Sequence
  Description of Artificial Sequence: Synthetic oligonucleotide
gtctattattgtgctcgckctkctkctkctkctgstwtkgactactggggtcaagga

SEQ ID NO: 1117 - DNA, 60 bp, Artificial Sequence
  Description of Artificial Sequence: Synthetic oligonucleotide
gtctattattgtgctcgckctkctkctkctkctkctgstwtkgactactggggtcaagga

SEQ ID NO: 1118 - DNA, 63 bp, Artificial Sequence
  Description of Artificial Sequence: Synthetic oligonucleotide
gtctattattgtgctcgckctkctkctkctkctkctkctgstwtkgactactggggtcaagga

SEQ ID NO: 1119 - DNA, 66 bp, Artificial Sequence
  Description of Artificial Sequence: Synthetic oligonucleotide
gtctattattgtgctcgckctkctkctkctkctkctkctkctgstwtkgactactggggtcaagga

SEQ ID NO: 1120 - DNA, 69 bp, Artificial Sequence
  Description of Artificial Sequence: Synthetic oligonucleotide
gtctattattgtgctcgckctkctkctkctkctkctkctkctkctgstwtkgactactggggtcaagga

SEQ ID NO: 1121 - DNA, 72 bp, Artificial Sequence
  Description of Artificial Sequence: Synthetic oligonucleotide
gtctattattgtgctcgckctkctkctkctkctkctkctkctkctkctgstwtkgactactggggtcaagga

SEQ ID NO: 1122 - DNA, 75 bp, Artificial Sequence
  Description of Artificial Sequence: Synthetic oligonucleotide
gtctattattgtgctcgckctkctkctkctkctkctkctkctkctkctkctgstwtkgactactggggtcaagga

SEQ ID NO: 1123 - DNA, 78 bp, Artificial Sequence
  Description of Artificial Sequence: Synthetic oligonucleotide
gtctattattgtgctcgckctkctkctkctkctkctkctkctkctkctkctkctgstwtkgactactggggtcaagga

SEQ ID NO: 1124 - DNA, 81 bp, Artificial Sequence
  Description of Artificial Sequence: Synthetic oligonucleotide
gtctattattgtgctcgckctkctkctkctkctkctkctkctkctkctkctkctkctgstwtkgactactggggtcaagga

SEQ ID NO: 1125 - DNA, 84 bp, Artificial Sequence
  Description of Artificial Sequence: Synthetic oligonucleotide
gtctattattgtgctcgckctkctkctkctkctkctkctkctkctkctkctkctkctkctgstwtkgactactggggtcaagga

SEQ ID NO: 1126 - DNA, 87 bp, Artificial Sequence
  Description of Artificial Sequence: Synthetic oligonucleotide
gtctattattgtgctcgckctkctkctkctkctkctkctkctkctkctkctkctkctkctkctgstwtkgactactggggtcaagga

SEQ ID NO: 1127 - DNA, 90 bp, Artificial Sequence
  Description of Artificial Sequence: Synthetic oligonucleotide
gtctattattgtgctcgckctkctkctkctkctkctkctkctkctkctkctkctkctkctkctkctgstwtkgactactggggtcaagga

SEQ ID NO: 1128 - DNA, 93 bp, Artificial Sequence
  Description of Artificial Sequence: Synthetic oligonucleotide
gtctattattgtgctcgckctkctkctkctkctkctkctkctkctkctkctkctkctkctkctkctkctgstwtkgactactggggtcaagga

SEQ ID NO: 1129 - DNA, 54 bp, Artificial Sequence
  Description of Artificial Sequence: Synthetic oligonucleotide
gtctattattgtgctcgctsctsctsctscgstwtkgactactggggtcaagga

SEQ ID NO: 1130 - DNA, 57 bp, Artificial Sequence
  Description of Artificial Sequence: Synthetic oligonucleotide
gtctattattgtgctcgctsctsctsctsctscgstwtkgactactggggtcaagga

SEQ ID NO: 1131 - DNA, 60 bp, Artificial Sequence
  Description of Artificial Sequence: Synthetic oligonucleotide
gtctattattgtgctcgctsctsctsctsctsctscgstwtkgactactggggtcaagga

SEQ ID NO: 1132 - DNA, 63 bp, Artificial Sequence
  Description of Artificial Sequence: Synthetic oligonucleotide
gtctattattgtgctcgctsctsctsctsctsctsctscgstwtkgactactggggtcaagga

SEQ ID NO: 1133 - DNA, 66 bp, Artificial Sequence
  Description of Artificial Sequence: Synthetic oligonucleotide
gtctattattgtgctcgctsctsctsctsctsctsctsctscgstwtkgactactggggtcaagga

SEQ ID NO: 1134 - DNA, 69 bp, Artificial Sequence
  Description of Artificial Sequence: Synthetic oligonucleotide
gtctattattgtgctcgctsctsctsctsctsctsctsctsctscgstwtkgactactggggtcaagga

SEQ ID NO: 1135 - DNA, 72 bp, Artificial Sequence
  Description of Artificial Sequence: Synthetic oligonucleotide
gtctattattgtgctcgctsctsctsctsctsctsctsctsctsctscgstwtkgactactggggtcaagga

SEQ ID NO: 1136 - DNA, 75 bp, Artificial Sequence
  Description of Artificial Sequence: Synthetic oligonucleotide
gtctattattgtgctcgctsctsctsctsctsctsctsctsctsctsctscgstwtkgactactggggtcaagga

SEQ ID NO: 1137 - DNA, 78 bp, Artificial Sequence
  Description of Artificial Sequence: Synthetic oligonucleotide
gtctattattgtgctcgctsctsctsctsctsctsctsctsctsctsctsctscgstwtkgactactggggtcaagga

SEQ ID NO: 1138 - DNA, 81 bp, Artificial Sequence
  Description of Artificial Sequence: Synthetic oligonucleotide
gtctattattgtgctcgctsctsctsctsctsctsctsctsctsctsctsctsctscgstwtkgactactggggtcaagga

SEQ ID NO: 1139 - DNA, 84 bp, Artificial Sequence
  Description of Artificial Sequence: Synthetic oligonucleotide
gtctattattgtgctcgctsctsctsctsctsctsctsctsctsctsctsctsctsctscgstwtkgactactggggtcaagga

SEQ ID NO: 1140 - DNA, 87 bp, Artificial Sequence
  Description of Artificial Sequence: Synthetic oligonucleotide
gtctattattgtgctcgctsctsctsctsctsctsctsctsctsctsctsctsctsctsctscgstwtkgactactggggtcaagga

SEQ ID NO: 1141 - DNA, 90 bp, Artificial Sequence
  Description of Artificial Sequence: Synthetic oligonucleotide
gtctattattgtgctcgctsctsctsctsctsctsctsctsctsctsctsctsctsctsctsctscgstwtkgactactggggtcaagga

SEQ ID NO: 1142 - DNA, 93 bp, Artificial Sequence
  Description of Artificial Sequence: Synthetic oligonucleotide
gtctattattgtgctcgctsctsctsctsctsctsctsctsctsctsctsctsctsctsctsctsctscgstwtkgactactggggtcaagga

SEQ ID NO: 1143 - DNA, 54 bp, Artificial Sequence
  Description of Artificial Sequence: Synthetic oligonucleotide
gtctattattgtgctcgctyctyctyctycgstwtkgactactggggtcaagga

SEQ ID NO: 1144 - DNA, 57 bp, Artificial Sequence
  Description of Artificial Sequence: Synthetic oligonucleotide
gtctattattgtgctcgctyctyctyctyctycgstwtkgactactggggtcaagga

SEQ ID NO: 1145 - DNA, 60 bp, Artificial Sequence
  Description of Artificial Sequence: Synthetic oligonucleotide
gtctattattgtgctcgctyctyctyctyctyctycgstwtkgactactggggtcaagga

SEQ ID NO: 1146 - DNA, 63 bp, Artificial Sequence
  Description of Artificial Sequence: Synthetic oligonucleotide
gtctattattgtgctcgctyctyctyctyctyctyctycgstwtkgactactggggtcaagga

SEQ ID NO: 1147 - DNA, 66 bp, Artificial Sequence
  Description of Artificial Sequence: Synthetic oligonucleotide
gtctattattgtgctcgctyctyctyctyctyctyctyctycgstwtkgactactggggtcaagga

SEQ ID NO: 1148 - DNA, 69 bp, Artificial Sequence
  Description of Artificial Sequence: Synthetic oligonucleotide
gtctattattgtgctcgctyctyctyctyctyctyctyctyctycgstwtkgactactggggtcaagga

SEQ ID NO: 1149 - DNA, 72 bp, Artificial Sequence
  Description of Artificial Sequence: Synthetic oligonucleotide
gtctattattgtgctcgctyctyctyctyctyctyctyctyctyctycgstwtkgactactggggtcaagga

SEQ ID NO: 1150 - DNA, 75 bp, Artificial Sequence
  Description of Artificial Sequence: Synthetic oligonucleotide
gtctattattgtgctcgctyctyctyctyctyctyctyctyctyctyctycgstwtkgactactggggtcaagga

SEQ ID NO: 1151 - DNA, 78 bp, Artificial Sequence
  Description of Artificial Sequence: Synthetic oligonucleotide
gtctattattgtgctcgctyctyctyctyctyctyctyctyctyctyctyctycgstwtkgactactggggtcaagga

SEQ ID NO: 1152 - DNA, 81 bp, Artificial Sequence
  Description of Artificial Sequence: Synthetic oligonucleotide
gtctattattgtgctcgctyctyctyctyctyctyctyctyctyctyctyctyctycgstwtkgactactggggtcaagga

SEQ ID NO: 1153 - DNA, 84 bp, Artificial Sequence
  Description of Artificial Sequence: Synthetic oligonucleotide
gtctattattgtgctcgctyctyctyctyctyctyctyctyctyctyctyctyctyctycgstwtkgactactggggtcaagga

SEQ ID NO: 1154 - DNA, 87 bp, Artificial Sequence
  Description of Artificial Sequence: Synthetic oligonucleotide
gtctattattgtgctcgctyctyctyctyctyctyctyctyctyctyctyctyctyctyctycgstwtkgactactggggtcaagga

SEQ ID NO: 1155 - DNA, 90 bp, Artificial Sequence
  Description of Artificial Sequence: Synthetic oligonucleotide
gtctattattgtgctcgctyctyctyctyctyctyctyctyctyctyctyctyctyctyctyctycgstwtkgactactggggtcaagga

SEQ ID NO: 1156 - DNA, 93 bp, Artificial Sequence
  Description of Artificial Sequence: Synthetic oligonucleotide
gtctattattgtgctcgctyctyctyctyctyctyctyctyctyctyctyctyctyctyctyctyctycgstwtkgactactggggtcaagga

SEQ ID NO: 1157 - DNA, 54 bp, Artificial Sequence
  Description of Artificial Sequence: Synthetic oligonucleotide
gtctattattgtgctcgcrgcrgcrgcrgcgstwtkgactactggggtcaagga

SEQ ID NO: 1158 - DNA, 57 bp, Artificial Sequence
  Description of Artificial Sequence: Synthetic oligonucleotide
gtctattattgtgctcgcrgcrgcrgcrgcrgcgstwtkgactactggggtcaagga

SEQ ID NO: 1159 - DNA, 60 bp, Artificial Sequence
  Description of Artificial Sequence: Synthetic oligonucleotide
gtctattattgtgctcgcrgcrgcrgcrgcrgcrgcgstwtkgactactggggtcaagga

SEQ ID NO: 1160 - DNA, 63 bp, Artificial Sequence
  Description of Artificial Sequence: Synthetic oligonucleotide
gtctattattgtgctcgcrgcrgcrgcrgcrgcrgcrgcgstwtkgactactggggtcaagga

SEQ ID NO: 1161 - DNA, 66 bp, Artificial Sequence
  Description of Artificial Sequence: Synthetic oligonucleotide
gtctattattgtgctcgcrgcrgcrgcrgcrgcrgcrgcrgcgstwtkgactactggggtcaagga

SEQ ID NO: 1162 - DNA, 69 bp, Artificial Sequence
  Description of Artificial Sequence: Synthetic oligonucleotide
gtctattattgtgctcgcrgcrgcrgcrgcrgcrgcrgcrgcrgcgstwtkgactactggggtcaagga

SEQ ID NO: 1163 - DNA, 72 bp, Artificial Sequence
  Description of Artificial Sequence: Synthetic oligonucleotide
gtctattattgtgctcgcrgcrgcrgcrgcrgcrgcrgcrgcrgcrgcgstwtkgactactggggtcaagga

SEQ ID NO: 1164 - DNA, 75 bp, Artificial Sequence
  Description of Artificial Sequence: Synthetic oligonucleotide
gtctattattgtgctcgcrgcrgcrgcrgcrgcrgcrgcrgcrgcrgcrgcgstwtkgactactggggtcaagga

SEQ ID NO: 1165 - DNA, 78 bp, Artificial Sequence
  Description of Artificial Sequence: Synthetic oligonucleotide
gtctattattgtgctcgcrgcrgcrgcrgcrgcrgcrgcrgcrgcrgcrgcrgcgstwtkgactactggggtcaagga

SEQ ID NO: 1166 - DNA, 81 bp, Artificial Sequence
  Description of Artificial Sequence: Synthetic oligonucleotide
gtctattattgtgctcgcrgcrgcrgcrgcrgcrgcrgcrgcrgcrgcrgcrgcrgcgstwtkgactactggggtcaagga

SEQ ID NO: 1167 - DNA, 84 bp, Artificial Sequence
  Description of Artificial Sequence: Synthetic oligonucleotide
gtctattattgtgctcgcrgcrgcrgcrgcrgcrgcrgcrgcrgcrgcrgcrgcrgcrgcgstwtkgactactggggtcaagga

SEQ ID NO: 1168 - DNA, 87 bp, Artificial Sequence
  Description of Artificial Sequence: Synthetic oligonucleotide
gtctattattgtgctcgcrgcrgcrgcrgcrgcrgcrgcrgcrgcrgcrgcrgcrgcrgcrgcgstwtkgactactggggtcaagga

SEQ ID NO: 1169 - DNA, 90 bp, Artificial Sequence
  Description of Artificial Sequence: Synthetic oligonucleotide
gtctattattgtgctcgcrgcrgcrgcrgcrgcrgcrgcrgcrgcrgcrgcrgcrgcrgcrgcrgcgstwtkgactactggggtcaagga

SEQ ID NO: 1170 - DNA, 93 bp, Artificial Sequence
  Description of Artificial Sequence: Synthetic oligonucleotide
gtctattattgtgctcgcrgcrgcrgcrgcrgcrgcrgcrgcrgcrgcrgcrgcrgcrgcrgcrgcrgcgstwtkgactactggggtcaagga

SEQ ID NO: 1171 - DNA, 54 bp, Artificial Sequence
  Description of Artificial Sequence: Synthetic oligonucleotide
gtctattattgtgctcgcakcakcakcakcgstwtkgactactggggtcaagga

SEQ ID NO: 1172 - DNA, 57 bp, Artificial Sequence
  Description of Artificial Sequence: Synthetic oligonucleotide
gtctattattgtgctcgcakcakcakcakcakcgstwtkgactactggggtcaagga

SEQ ID NO: 1173 - DNA, 60 bp, Artificial Sequence
  Description of Artificial Sequence: Synthetic oligonucleotide
gtctattattgtgctcgcakcakcakcakcakcakcgstwtkgactactggggtcaagga

SEQ ID NO: 1174 - DNA, 63 bp, Artificial Sequence
  Description of Artificial Sequence: Synthetic oligonucleotide
gtctattattgtgctcgcakcakcakcakcakcakcakcgstwtkgactactggggtcaagga

SEQ ID NO: 1175 - DNA, 66 bp, Artificial Sequence
  Description of Artificial Sequence: Synthetic oligonucleotide
gtctattattgtgctcgcakcakcakcakcakcakcakcakcgstwtkgactactggggtcaagga

SEQ ID NO: 1176 - DNA, 69 bp, Artificial Sequence
  Description of Artificial Sequence: Synthetic oligonucleotide
gtctattattgtgctcgcakcakcakcakcakcakcakcakcakcgstwtkgactactggggtcaagga

SEQ ID NO: 1177 - DNA, 72 bp, Artificial Sequence
  Description of Artificial Sequence: Synthetic oligonucleotide
gtctattattgtgctcgcakcakcakcakcakcakcakcakcakcakcgstwtkgactactggggtcaagga

SEQ ID NO: 1178 - DNA, 75 bp, Artificial Sequence
  Description of Artificial Sequence: Synthetic oligonucleotide
gtctattattgtgctcgcakcakcakcakcakcakcakcakcakcakcakcgstwtkgactactggggtcaagga

SEQ ID NO: 1179 - DNA, 78 bp, Artificial Sequence
  Description of Artificial Sequence: Synthetic oligonucleotide
gtctattattgtgctcgcakcakcakcakcakcakcakcakcakcakcakcakcgstwtkgactactggggtcaagga

SEQ ID NO: 1180 - DNA, 81 bp, Artificial Sequence
  Description of Artificial Sequence: Synthetic oligonucleotide
gtctattattgtgctcgcakcakcakcakcakcakcakcakcakcakcakcakcakcgstwtkgactactggggtcaagga

SEQ ID NO: 1181 - DNA, 84 bp, Artificial Sequence
  Description of Artificial Sequence: Synthetic oligonucleotide
gtctattattgtgctcgcakcakcakcakcakcakcakcakcakcakcakcakcakcakcgstwtkgactactggggtcaagga

SEQ ID NO: 1182 - DNA, 87 bp, Artificial Sequence
  Description of Artificial Sequence: Synthetic oligonucleotide
gtctattattgtgctcgcakcakcakcakcakcakcakcakcakcakcakcakcakcakcakcgstwtkgactactggggtcaagga

SEQ ID NO: 1183 - DNA, 90 bp, Artificial Sequence
  Description of Artificial Sequence: Synthetic oligonucleotide
gtctattattgtgctcgcakcakcakcakcakcakcakcakcakcakcakcakcakcakcakcakcgstwtkgactactggggtcaagga

SEQ ID NO: 1184 - DNA, 93 bp, Artificial Sequence
  Description of Artificial Sequence: Synthetic oligonucleotide
gtctattattgtgctcgcakcakcakcakcakcakcakcakcakcakcakcakcakcakcakcakcakcgstwtkgactactggggtcaagga

SEQ ID NO: 1185 - DNA, 54 bp, Artificial Sequence
  Description of Artificial Sequence: Synthetic oligonucleotide
gtctattattgtgctcgctyatyatyatyagstwtkgactactggggtcaagga

SEQ ID NO: 1186 - DNA, 57 bp, Artificial Sequence
  Description of Artificial Sequence: Synthetic oligonucleotide
gtctattattgtgctcgctyatyatyatyatyagstwtkgactactggggtcaagga

SEQ ID NO: 1187 - DNA, 60 bp, Artificial Sequence
  Description of Artificial Sequence: Synthetic oligonucleotide
gtctattattgtgctcgctyatyatyatyatyatyagstwtkgactactggggtcaagga

SEQ ID NO: 1188 - DNA, 63 bp, Artificial Sequence
  Description of Artificial Sequence: Synthetic oligonucleotide
gtctattattgtgctcgctyatyatyatyatyatyatyagstwtkgactactggggtcaagga

SEQ ID NO: 1189 - DNA, 66 bp, Artificial Sequence
  Description of Artificial Sequence: Synthetic oligonucleotide
gtctattattgtgctcgctyatyatyatyatyatyatyatyagstwtkgactactggggtcaagga

SEQ ID NO: 1190 - DNA, 69 bp, Artificial Sequence
  Description of Artificial Sequence: Synthetic oligonucleotide
gtctattattgtgctcgctyatyatyatyatyatyatyatyatyagstwtkgactactggggtcaagga

SEQ ID NO: 1191 - DNA, 72 bp, Artificial Sequence
  Description of Artificial Sequence: Synthetic oligonucleotide
gtctattattgtgctcgctyatyatyatyatyatyatyatyatyatyagstwtkgactactggggtcaagga

SEQ ID NO: 1192 - DNA, 75 bp, Artificial Sequence
  Description of Artificial Sequence: Synthetic oligonucleotide
gtctattattgtgctcgctyatyatyatyatyatyatyatyatyatyatyagstwtkgactactggggtcaagga

SEQ ID NO: 1193 - DNA, 78 bp, Artificial Sequence
  Description of Artificial Sequence: Synthetic oligonucleotide
gtctattattgtgctcgctyatyatyatyatyatyatyatyatyatyatyatyagstwtkgactactggggtcaagga

SEQ ID NO: 1194 - DNA, 81 bp, Artificial Sequence
  Description of Artificial Sequence: Synthetic oligonucleotide
gtctattattgtgctcgctyatyatyatyatyatyatyatyatyatyatyatyatyagstwtkgactactggggtcaagga

SEQ ID NO: 1195 - DNA, 84 bp, Artificial Sequence
  Description of Artificial Sequence: Synthetic oligonucleotide
gtctattattgtgctcgctyatyatyatyatyatyatyatyatyatyatyatyatyatyagstwtkgactactggggtcaagga

SEQ ID NO: 1196 - DNA, 87 bp, Artificial Sequence
  Description of Artificial Sequence: Synthetic oligonucleotide
gtctattattgtgctcgctyatyatyatyatyatyatyatyatyatyatyatyatyatyatyagstwtkgactactggggtcaagga

SEQ ID NO: 1197 - DNA, 90 bp, Artificial Sequence
  Description of Artificial Sequence: Synthetic oligonucleotide
gtctattattgtgctcgctyatyatyatyatyatyatyatyatyatyatyatyatyatyatyatyagstwtkgactactggggtcaagga

SEQ ID NO: 1198 - DNA, 93 bp, Artificial Sequence
  Description of Artificial Sequence: Synthetic oligonucleotide
gtctattattgtgctcgctyatyatyatyatyatyatyatyatyatyatyatyatyatyatyatyatyagstwtkgactactggggtcaagga

SEQ ID NO: 1199 - DNA, 54 bp, Artificial Sequence
  Description of Artificial Sequence: Synthetic oligonucleotide
gtctattattgtgctcgcarcarcarcarcgstwtkgactactggggtcaagga

SEQ ID NO: 1200 - DNA, 57 bp, Artificial Sequence
  Description of Artificial Sequence: Synthetic oligonucleotide
gtctattattgtgctcgcarcarcarcarcarcgstwtkgactactggggtcaagga

SEQ ID NO: 1201 - DNA, 60 bp, Artificial Sequence
  Description of Artificial Sequence: Synthetic oligonucleotide
gtctattattgtgctcgcarcarcarcarcarcarcgstwtkgactactggggtcaagga

SEQ ID NO: 1202 - DNA, 63 bp, Artificial Sequence
  Description of Artificial Sequence: Synthetic oligonucleotide
gtctattattgtgctcgcarcarcarcarcarcarcarcgstwtkgactactggggtcaagga

SEQ ID NO: 1203 - DNA, 66 bp, Artificial Sequence
  Description of Artificial Sequence: Synthetic oligonucleotide
gtctattattgtgctcgcarcarcarcarcarcarcarcarcgstwtkgactactggggtcaagga

SEQ ID NO: 1204 - DNA, 69 bp, Artificial Sequence
  Description of Artificial Sequence: Synthetic oligonucleotide
gtctattattgtgctcgcarcarcarcarcarcarcarcarcarcgstwtkgactactggggtcaagga

SEQ ID NO: 1205 - DNA, 72 bp, Artificial Sequence
  Description of Artificial Sequence: Synthetic oligonucleotide
gtctattattgtgctcgcarcarcarcarcarcarcarcarcarcarcgstwtkgactactggggtcaagga

SEQ ID NO: 1206 - DNA, 75 bp, Artificial Sequence
  Description of Artificial Sequence: Synthetic oligonucleotide
gtctattattgtgctcgcarcarcarcarcarcarcarcarcarcarcarcgstwtkgactactggggtcaagga

SEQ ID NO: 1207 - DNA, 78 bp, Artificial Sequence
  Description of Artificial Sequence: Synthetic oligonucleotide
gtctattattgtgctcgcarcarcarcarcarcarcarcarcarcarcarcarcgstwtkgactactggggtcaagga

SEQ ID NO: 1208 - DNA, 81 bp, Artificial Sequence
  Description of Artificial Sequence: Synthetic oligonucleotide
gtctattattgtgctcgcarcarcarcarcarcarcarcarcarcarcarcarcarcgstwtkgactactggggtcaagga

SEQ ID NO: 1209 - DNA, 84 bp, Artificial Sequence
  Description of Artificial Sequence: Synthetic oligonucleotide
gtctattattgtgctcgcarcarcarcarcarcarcarcarcarcarcarcarcarcarcgstwtkgactactggggtcaagga

SEQ ID NO: 1210 - DNA, 87 bp, Artificial Sequence
  Description of Artificial Sequence: Synthetic oligonucleotide
gtctattattgtgctcgcarcarcarcarcarcarcarcarcarcarcarcarcarcarcarcgstwtkgactactggggtcaagga

SEQ ID NO: 1211 - DNA, 90 bp, Artificial Sequence
  Description of Artificial Sequence: Synthetic oligonucleotide
gtctattattgtgctcgcarcarcarcarcarcarcarcarcarcarcarcarcarcarcarcarcgstwtkgactactggggtcaagga

SEQ ID NO: 1212 - DNA, 93 bp, Artificial Sequence
  Description of Artificial Sequence: Synthetic oligonucleotide
gtctattattgtgctcgcarcarcarcarcarcarcarcarcarcarcarcarcarcarcarcarcarcgstwtkgactactggggtcaagga

SEQ ID NO: 1213 - DNA, 54 bp, Artificial Sequence
  Description of Artificial Sequence: Synthetic oligonucleotide
gtctattattgtgctcgcyctyctyctyctgstwtkgactactggggtcaagga

SEQ ID NO: 1214 - DNA, 57 bp, Artificial Sequence
  Description of Artificial Sequence: Synthetic oligonucleotide
gtctattattgtgctcgcyctyctyctyctyctgstwtkgactactggggtcaagga

SEQ ID NO: 1215 - DNA, 60 bp, Artificial Sequence
  Description of Artificial Sequence: Synthetic oligonucleotide
gtctattattgtgctcgcyctyctyctyctyctyctgstwtkgactactggggtcaagga

SEQ ID NO: 1216 - DNA, 63 bp, Artificial Sequence
  Description of Artificial Sequence: Synthetic oligonucleotide
gtctattattgtgctcgcyctyctyctyctyctyctyctgstwtkgactactggggtcaagga

SEQ ID NO: 1217 - DNA, 66 bp, Artificial Sequence
  Description of Artificial Sequence: Synthetic oligonucleotide
gtctattattgtgctcgcyctyctyctyctyctyctyctyctgstwtkgactactggggtcaagga

SEQ ID NO: 1218 - DNA, 69 bp, Artificial Sequence
  Description of Artificial Sequence: Synthetic oligonucleotide
gtctattattgtgctcgcyctyctyctyctyctyctyctyctyctgstwtkgactactggggtcaagga

SEQ ID NO: 1219 - DNA, 72 bp, Artificial Sequence
  Description of Artificial Sequence: Synthetic oligonucleotide
gtctattattgtgctcgcyctyctyctyctyctyctyctyctyctyctgstwtkgactactggggtcaagga

SEQ ID NO: 1220 - DNA, 75 bp, Artificial Sequence
  Description of Artificial Sequence: Synthetic oligonucleotide
gtctattattgtgctcgcyctyctyctyctyctyctyctyctyctyctyctgstwtkgactactggggtcaagga

SEQ ID NO: 1221 - DNA, 78 bp, Artificial Sequence
  Description of Artificial Sequence: Synthetic oligonucleotide
gtctattattgtgctcgcyctyctyctyctyctyctyctyctyctyctyctyctgstwtkgactactggggtcaagga

SEQ ID NO: 1222 - DNA, 81 bp, Artificial Sequence
  Description of Artificial Sequence: Synthetic oligonucleotide
gtctattattgtgctcgcyctyctyctyctyctyctyctyctyctyctyctyctyctgstwtkgactactggggtcaagga

SEQ ID NO: 1223 - DNA, 84 bp, Artificial Sequence
  Description of Artificial Sequence: Synthetic oligonucleotide
gtctattattgtgctcgcyctyctyctyctyctyctyctyctyctyctyctyctyctyctgstwtkgactactggggtcaagga

SEQ ID NO: 1224 - DNA, 87 bp, Artificial Sequence
  Description of Artificial Sequence: Synthetic oligonucleotide
gtctattattgtgctcgcyctyctyctyctyctyctyctyctyctyctyctyctyctyctyctgstwtkgactactggggtcaagga

SEQ ID NO: 1225 - DNA, 90 bp, Artificial Sequence
  Description of Artificial Sequence: Synthetic oligonucleotide
gtctattattgtgctcgcyctyctyctyctyctyctyctyctyctyctyctyctyctyctyctyctgstwtkgactactggggtcaagga

SEQ ID NO: 1226 - DNA, 93 bp, Artificial Sequence
  Description of Artificial Sequence: Synthetic oligonucleotide
gtctattattgtgctcgcyctyctyctyctyctyctyctyctyctyctyctyctyctyctyctyctyctgstwtkgactactggggtcaagga

SEQ ID NO: 1227 - DNA, 54 bp, Artificial Sequence
  Description of Artificial Sequence: Synthetic oligonucleotide
gtctattattgtgctcgcmgcmgcmgcmgcgstwtkgactactggggtcaagga

SEQ ID NO: 1228 - DNA, 57 bp, Artificial Sequence
  Description of Artificial Sequence: Synthetic oligonucleotide
gtctattattgtgctcgcmgcmgcmgcmgcmgcgstwtkgactactggggtcaagga

SEQ ID NO: 1229 - DNA, 60 bp, Artificial Sequence
  Description of Artificial Sequence: Synthetic oligonucleotide
gtctattattgtgctcgcmgcmgcmgcmgcmgcmgcgstwtkgactactggggtcaagga

SEQ ID NO: 1230 - DNA, 63 bp, Artificial Sequence
  Description of Artificial Sequence: Synthetic oligonucleotide
gtctattattgtgctcgcmgcmgcmgcmgcmgcmgcmgcgstwtkgactactggggtcaagga

SEQ ID NO: 1231 - DNA, 66 bp, Artificial Sequence
  Description of Artificial Sequence: Synthetic oligonucleotide
gtctattattgtgctcgcmgcmgcmgcmgcmgcmgcmgcmgcgstwtkgactactggggtcaagga

SEQ ID NO: 1232 - DNA, 69 bp, Artificial Sequence
  Description of Artificial Sequence: Synthetic oligonucleotide
gtctattattgtgctcgcmgcmgcmgcmgcmgcmgcmgcmgcmgcgstwtkgactactggggtcaagga

SEQ ID NO: 1233 - DNA, 72 bp, Artificial Sequence
  Description of Artificial Sequence: Synthetic oligonucleotide
gtctattattgtgctcgcmgcmgcmgcmgcmgcmgcmgcmgcmgcmgcgstwtkgactactggggtcaagga

SEQ ID NO: 1234 - DNA, 75 bp, Artificial Sequence
  Description of Artificial Sequence: Synthetic oligonucleotide
gtctattattgtgctcgcmgcmgcmgcmgcmgcmgcmgcmgcmgcmgcmgcgstwtkgactactggggtcaagga

SEQ ID NO: 1235 - DNA, 78 bp, Artificial Sequence
  Description of Artificial Sequence: Synthetic oligonucleotide
gtctattattgtgctcgcmgcmgcmgcmgcmgcmgcmgcmgcmgcmgcmgcmgcgstwtkgactactggggtcaagga

SEQ ID NO: 1236 - DNA, 81 bp, Artificial Sequence
  Description of Artificial Sequence: Synthetic oligonucleotide
gtctattattgtgctcgcmgcmgcmgcmgcmgcmgcmgcmgcmgcmgcmgcmgcmgcgstwtkgactactggggtcaagga

SEQ ID NO: 1237 - DNA, 84 bp, Artificial Sequence
  Description of Artificial Sequence: Synthetic oligonucleotide
gtctattattgtgctcgcmgcmgcmgcmgcmgcmgcmgcmgcmgcmgcmgcmgcmgcmgcgstwtkgactactggggtcaagga

SEQ ID NO: 1238 - DNA, 87 bp, Artificial Sequence
  Description of Artificial Sequence: Synthetic oligonucleotide
gtctattattgtgctcgcmgcmgcmgcmgcmgcmgcmgcmgcmgcmgcmgcmgcmgcmgcmgcgstwtkgactactggggtcaagga

SEQ ID NO: 1239 - DNA, 90 bp, Artificial Sequence
  Description of Artificial Sequence: Synthetic oligonucleotide
gtctattattgtgctcgcmgcmgcmgcmgcmgcmgcmgcmgcmgcmgcmgcmgcmgcmgcmgcmgcgstwtkgactactggggtcaagga

SEQ ID NO: 1240 - DNA, 93 bp, Artificial Sequence
  Description of Artificial Sequence: Synthetic oligonucleotide
gtctattattgtgctcgcmgcmgcmgcmgcmgcmgcmgcmgcmgcmgcmgcmgcmgcmgcmgcmgcmgcgstwtkgactactggggtcaagga

SEQ ID NO: 1241 - DNA, 54 bp, Artificial Sequence
  Description of Artificial Sequence: Synthetic oligonucleotide
gtctattattgtgctcgcascascascascgstwtkgactactggggtcaagga

SEQ ID NO: 1242 - DNA, 57 bp, Artificial Sequence
  Description of Artificial Sequence: Synthetic oligonucleotide
gtctattattgtgctcgcascascascascascgstwtkgactactggggtcaagga

SEQ ID NO: 1243 - DNA, 60 bp, Artificial Sequence
  Description of Artificial Sequence: Synthetic oligonucleotide
gtctattattgtgctcgcascascascascascascgstwtkgactactggggtcaagga

SEQ ID NO: 1244 - DNA, 63 bp, Artificial Sequence
  Description of Artificial Sequence: Synthetic oligonucleotide
gtctattattgtgctcgcascascascascascascascgstwtkgactactggggtcaagga

SEQ ID NO: 1245 - DNA, 66 bp, Artificial Sequence
  Description of Artificial Sequence: Synthetic oligonucleotide
gtctattattgtgctcgcascascascascascascascascgstwtkgactactggggtcaagga

SEQ ID NO: 1246 - DNA, 69 bp, Artificial Sequence
  Description of Artificial Sequence: Synthetic oligonucleotide
gtctattattgtgctcgcascascascascascascascascascgstwtkgactactggggtcaagga

SEQ ID NO: 1247 - DNA, 72 bp, Artificial Sequence
  Description of Artificial Sequence: Synthetic oligonucleotide
gtctattattgtgctcgcascascascascascascascascascascgstwtkgactactggggtcaagga

SEQ ID NO: 1248 - DNA, 75 bp, Artificial Sequence
  Description of Artificial Sequence: Synthetic oligonucleotide
gtctattattgtgctcgcascascascascascascascascascascascgstwtkgactactggggtcaagga

SEQ ID NO: 1249 - DNA, 78 bp, Artificial Sequence
  Description of Artificial Sequence: Synthetic oligonucleotide
gtctattattgtgctcgcascascascascascascascascascascascascgstwtkgactactggggtcaagga

SEQ ID NO: 1250 - DNA, 81 bp, Artificial Sequence
  Description of Artificial Sequence: Synthetic oligonucleotide
gtctattattgtgctcgcascascascascascascascascascascascascascgstwtkgactactggggtcaagga

SEQ ID NO: 1251 - DNA, 84 bp, Artificial Sequence
  Description of Artificial Sequence: Synthetic oligonucleotide
gtctattattgtgctcgcascascascascascascascascascascascascascascgstwtkgactactggggtcaagga

SEQ ID NO: 1252 - DNA, 87 bp, Artificial Sequence
  Description of Artificial Sequence: Synthetic oligonucleotide
gtctattattgtgctcgcascascascascascascascascascascascascascascascgstwtkgactactggggtcaagga

SEQ ID NO: 1253 - DNA, 90 bp, Artificial Sequence
  Description of Artificial Sequence: Synthetic oligonucleotide
gtctattattgtgctcgcascascascascascascascascascascascascascascascascgstwtkgactactggggtcaagga

SEQ ID NO: 1254 - DNA, 93 bp, Artificial Sequence
  Description of Artificial Sequence: Synthetic oligonucleotide
gtctattattgtgctcgcascascascascascascascascascascascascascascascascascgstwtkgactactggggtcaagga

SEQ ID NO: 1255 - DNA, 54 bp, Artificial Sequence
  Description of Artificial Sequence: Synthetic oligonucleotide
gtctattattgtgctcgctsgtsgtsgtsggstwtkgactactggggtcaagga

SEQ ID NO: 1256 - DNA, 57 bp, Artificial Sequence
  Description of Artificial Sequence: Synthetic oligonucleotide
gtctattattgtgctcgctsgtsgtsgtsgtsggstwtkgactactggggtcaagga

SEQ ID NO: 1257 - DNA, 60 bp, Artificial Sequence
  Description of Artificial Sequence: Synthetic oligonucleotide
gtctattattgtgctcgctsgtsgtsgtsgtsgtsggstwtkgactactggggtcaagga

SEQ ID NO: 1258 - DNA, 63 bp, Artificial Sequence
  Description of Artificial Sequence: Synthetic oligonucleotide
gtctattattgtgctcgctsgtsgtsgtsgtsgtsgtsggstwtkgactactggggtcaagga

SEQ ID NO: 1259 - DNA, 66 bp, Artificial Sequence
  Description of Artificial Sequence: Synthetic oligonucleotide
gtctattattgtgctcgctsgtsgtsgtsgtsgtsgtsgtsggstwtkgactactggggtcaagga

SEQ ID NO: 1260 - DNA, 69 bp, Artificial Sequence
  Description of Artificial Sequence: Synthetic oligonucleotide
gtctattattgtgctcgctsgtsgtsgtsgtsgtsgtsgtsgtsggstwtkgactactggggtcaagga

SEQ ID NO: 1261 - DNA, 72 bp, Artificial Sequence
  Description of Artificial Sequence: Synthetic oligonucleotide
gtctattattgtgctcgctsgtsgtsgtsgtsgtsgtsgtsgtsgtsggstwtkgactactggggtcaagga

SEQ ID NO: 1262 - DNA, 75 bp, Artificial Sequence
  Description of Artificial Sequence: Synthetic oligonucleotide
gtctattattgtgctcgctsgtsgtsgtsgtsgtsgtsgtsgtsgtsgtsggstwtkgactactggggtcaagga

SEQ ID NO: 1263 - DNA, 78 bp, Artificial Sequence
  Description of Artificial Sequence: Synthetic oligonucleotide
gtctattattgtgctcgctsgtsgtsgtsgtsgtsgtsgtsgtsgtsgtsgtsggstwtkgactactggggtcaagga

SEQ ID NO: 1264 - DNA, 81 bp, Artificial Sequence
  Description of Artificial Sequence: Synthetic oligonucleotide
gtctattattgtgctcgctsgtsgtsgtsgtsgtsgtsgtsgtsgtsgtsgtsgtsggstwtkgactactggggtcaagga

SEQ ID NO: 1265 - DNA, 84 bp, Artificial Sequence
  Description of Artificial Sequence: Synthetic oligonucleotide
gtctattattgtgctcgctsgtsgtsgtsgtsgtsgtsgtsgtsgtsgtsgtsgtsgtsggstwtkgactactggggtcaagga

SEQ ID NO: 1266 - DNA, 87 bp, Artificial Sequence
  Description of Artificial Sequence: Synthetic oligonucleotide
gtctattattgtgctcgctsgtsgtsgtsgtsgtsgtsgtsgtsgtsgtsgtsgtsgtsgtsggstwtkgactactggggtcaagga

SEQ ID NO: 1267 - DNA, 90 bp, Artificial Sequence
  Description of Artificial Sequence: Synthetic oligonucleotide
gtctattattgtgctcgctsgtsgtsgtsgtsgtsgtsgtsgtsgtsgtsgtsgtsgtsgtsgtsggstwtkgactactggggtcaagga

SEQ ID NO: 1268 - DNA, 93 bp, Artificial Sequence
  Description of Artificial Sequence: Synthetic oligonucleotide
gtctattattgtgctcgctsgtsgtsgtsgtsgtsgtsgtsgtsgtsgtsgtsgtsgtsgtsgtsgtsggstwtkgactactggggtcaagga

SEQ ID NO: 1269 - DNA, 54 bp, Artificial Sequence
  Description of Artificial Sequence: Synthetic oligonucleotide
gtctattattgtgctcgctmttmttmttmtgstwtkgactactggggtcaagga

SEQ ID NO: 1270 - DNA, 57 bp, Artificial Sequence
  Description of Artificial Sequence: Synthetic oligonucleotide
gtctattattgtgctcgctmttmttmttmttmtgstwtkgactactggggtcaagga

SEQ ID NO: 1271 - DNA, 60 bp, Artificial Sequence; identical to SEQ ID NO: 13
  Description of Artificial Sequence: Synthetic oligonucleotide

SEQ ID NO: 1272 - DNA, 63 bp, Artificial Sequence; identical to SEQ ID NO: 14
  Description of Artificial Sequence: Synthetic oligonucleotide

SEQ ID NO: 1273 - DNA, 66 bp, Artificial Sequence; identical to SEQ ID NO: 15
  Description of Artificial Sequence: Synthetic oligonucleotide

SEQ ID NO: 1274 - DNA, 69 bp, Artificial Sequence; identical to SEQ ID NO: 16
  Description of Artificial Sequence: Synthetic oligonucleotide

SEQ ID NO: 1275 - DNA, 72 bp, Artificial Sequence; identical to SEQ ID NO: 17
  Description of Artificial Sequence: Synthetic oligonucleotide

SEQ ID NO: 1276 - DNA, 75 bp, Artificial Sequence; identical to SEQ ID NO: 18
  Description of Artificial Sequence: Synthetic oligonucleotide

SEQ ID NO: 1277 - DNA, 78 bp, Artificial Sequence; identical to SEQ ID NO: 19
  Description of Artificial Sequence: Synthetic oligonucleotide

SEQ ID NO: 1278 - DNA, 81 bp, Artificial Sequence; identical to SEQ ID NO: 20
  Description of Artificial Sequence: Synthetic oligonucleotide

SEQ ID NO: 1279 - DNA, 84 bp, Artificial Sequence; identical to SEQ ID NO: 21
  Description of Artificial Sequence: Synthetic oligonucleotide

SEQ ID NO: 1280 - DNA, 87 bp, Artificial Sequence; identical to SEQ ID NO: 22
  Description of Artificial Sequence: Synthetic oligonucleotide

SEQ ID NO: 1281 - DNA, 90 bp, Artificial Sequence; identical to SEQ ID NO: 23
  Description of Artificial Sequence: Synthetic oligonucleotide

SEQ ID NO: 1282 - DNA, 93 bp, Artificial Sequence; identical to SEQ ID NO: 24
  Description of Artificial Sequence: Synthetic oligonucleotide

SEQ ID NO: 1283 - protein, 9 aa, Artificial Sequence
  Description of Artificial Sequence: Synthetic peptide
QQSYYSPYT

SEQ ID NO: 1284 - protein, 9 aa, Artificial Sequence
  Description of Artificial Sequence: Synthetic peptide
QQYSYYPST

SEQ ID NO: 1285 - protein, 9 aa, Artificial Sequence
  Description of Artificial Sequence: Synthetic peptide
QQYSYYPST

SEQ ID NO: 1286 - protein, 9 aa, Artificial Sequence
  Description of Artificial Sequence: Synthetic peptide
QQYSSYPST

SEQ ID NO: 1287 - protein, 9 aa, Artificial Sequence
  Description of Artificial Sequence: Synthetic peptide
QQSYYYPST

SEQ ID NO: 1288 - protein, 9 aa, Artificial Sequence
  Description of Artificial Sequence: Synthetic peptide
QQYYSYPST

SEQ ID NO: 1289 - protein, 9 aa, Artificial Sequence
  Description of Artificial Sequence: Synthetic peptide
QQYYSYPST

SEQ ID NO: 1290 - protein, 9 aa, Artificial Sequence
  Description of Artificial Sequence: Synthetic peptide
  MOD_RES (3)..(6): Variable amino acid
  MOD_RES (8)..(8): Variable amino acid
QQXXXXPXT

SEQ ID NO: 1291 - protein, 9 aa, Artificial Sequence
  Description of Artificial Sequence: Synthetic peptide
QQSYYSPYT

SEQ ID NO: 1292 - protein, 9 aa, Artificial Sequence
  Description of Artificial Sequence: Synthetic peptide
QQSYYSPST

SEQ ID NO: 1293 - protein, 9 aa, Artificial Sequence
  Description of Artificial Sequence: Synthetic peptide
QQSYSYPST

SEQ ID NO: 1294 - protein, 9 aa, Artificial Sequence
  Description of Artificial Sequence: Synthetic peptide
QQSYSYPST

SEQ ID NO: 1295 - protein, 9 aa, Artificial Sequence
  Description of Artificial Sequence: Synthetic peptide
QQSYYSPST

SEQ ID NO: 1296 - protein, 9 aa, Artificial Sequence
  Description of Artificial Sequence: Synthetic peptide
QQSSSSPYT

SEQ ID NO: 1297 - protein, 9 aa, Artificial Sequence
  Description of Artificial Sequence: Synthetic peptide
QQSYSYPST

SEQ ID NO: 1298 - protein, 9 aa, Artificial Sequence
  Description of Artificial Sequence: Synthetic peptide
QQSYSYPST

SEQ ID NO: 1299 - protein, 9 aa, Artificial Sequence
  Description of Artificial Sequence: Synthetic peptide
QQSYYYPST

SEQ ID NO: 1300 - protein, 9 aa, Artificial Sequence
  Description of Artificial Sequence: Synthetic peptide
QQSYYYPST

SEQ ID NO: 1301 - protein, 9 aa, Artificial Sequence
  Description of Artificial Sequence: Synthetic peptide
QQSSSYPST

SEQ ID NO: 1302 - protein, 9 aa, Artificial Sequence
  Description of Artificial Sequence: Synthetic peptide
QQSYSYPST

SEQ ID NO: 1303 - protein, 9 aa, Artificial Sequence
  Description of Artificial Sequence: Synthetic peptide
QQSYSSPST

SEQ ID NO: 1304 - protein, 9 aa, Artificial Sequence
  Description of Artificial Sequence: Synthetic peptide
QQYYYSPST

SEQ ID NO: 1305 - protein, 9 aa, Artificial Sequence
  Description of Artificial Sequence: Synthetic peptide
QQSSSYPST

SEQ ID NO: 1306 - protein, 9 aa, Artificial Sequence
  Description of Artificial Sequence: Synthetic peptide
QQSYSYPST

SEQ ID NO: 1307 - protein, 9 aa, Artificial Sequence
  Description of Artificial Sequence: Synthetic peptide
QQSYSYPST

SEQ ID NO: 1308 - protein, 9 aa, Artificial Sequence
  Description of Artificial Sequence: Synthetic peptide
QQYYSYPST

SEQ ID NO: 1309 - protein, 9 aa, Artificial Sequence
  Description of Artificial Sequence: Synthetic peptide
QQSSSSPYT

SEQ ID NO: 1310 - protein, 9 aa, Artificial Sequence
  Description of Artificial Sequence: Synthetic peptide
QQYSSYPST

SEQ ID NO: 1311 - protein, 9 aa, Artificial Sequence
  Description of Artificial Sequence: Synthetic peptide
QQSYSSPYT

SEQ ID NO: 1312 - protein, 9 aa, Artificial Sequence
  Description of Artificial Sequence: Synthetic peptide
QQYYSSPYT

SEQ ID NO: 1313 - protein, 9 aa, Artificial Sequence
  Description of Artificial Sequence: Synthetic peptide
QQSYSYPST

SEQ ID NO: 1314 - protein, 9 aa, Artificial Sequence
  Description of Artificial Sequence: Synthetic peptide
QQSYSYPST

SEQ ID NO: 1315 - protein, 9 aa, Artificial Sequence
  Description of Artificial Sequence: Synthetic peptide
QQSYSSPST

SEQ ID NO: 1316 - protein, 9 aa, Artificial Sequence
  Description of Artificial Sequence: Synthetic peptide
QQSYSYPST

SEQ ID NO: 1317 - protein, 9 aa, Artificial Sequence
  Description of Artificial Sequence: Synthetic peptide
QQSYSYPST

SEQ ID NO: 1318 - protein, 9 aa, Artificial Sequence
  Description of Artificial Sequence: Synthetic peptide
QQHYTTPPT

SEQ ID NO: 1319 - protein, 9 aa, Artificial Sequence
  Description of Artificial Sequence: Synthetic peptide
QQSYSYPST

SEQ ID NO: 1320 - protein, 9 aa, Artificial Sequence
  Description of Artificial Sequence: Synthetic peptide
QQSYYYPST

SEQ ID NO: 1321 - protein, 9 aa, Artificial Sequence
  Description of Artificial Sequence: Synthetic peptide
QQSYYSPYT

SEQ ID NO: 1322 - protein, 9 aa, Artificial Sequence
  Description of Artificial Sequence: Synthetic peptide
QQSYSYPST

SEQ ID NO: 1323 - protein, 9 aa, Artificial Sequence
  Description of Artificial Sequence: Synthetic peptide
QQSSSSPST

SEQ ID NO: 1324 - protein, 9 aa, Artificial Sequence
  Description of Artificial Sequence: Synthetic peptide
QQSYYYPST

SEQ ID NO: 1325 - protein, 9 aa, Artificial Sequence
  Description of Artificial Sequence: Synthetic peptide
QQSYSYPST

SEQ ID NO: 1326 - protein, 9 aa, Artificial Sequence
  Description of Artificial Sequence: Synthetic peptide
QQSYSSPYT

SEQ ID NO: 1327 - protein, 9 aa, Artificial Sequence
  Description of Artificial Sequence: Synthetic peptide
QQSSYSPYT

SEQ ID NO: 1328 - protein, 9 aa, Artificial Sequence
  Description of Artificial Sequence: Synthetic peptide
QQSYYSPST

SEQ ID NO: 1329 - protein, 9 aa, Artificial Sequence
  Description of Artificial Sequence: Synthetic peptide
QQSYSYPST

SEQ ID NO: 1330 - protein, 9 aa, Artificial Sequence
  Description of Artificial Sequence: Synthetic peptide
QQYYYSPYT

SEQ ID NO: 1331 - protein, 9 aa, Artificial Sequence
  Description of Artificial Sequence: Synthetic peptide
QQSYYYPST

SEQ ID NO: 1332 - protein, 9 aa, Artificial Sequence
  Description of Artificial Sequence: Synthetic peptide
QQYYSYPST

SEQ ID NO: 1333 - protein, 9 aa, Artificial Sequence
  Description of Artificial Sequence: Synthetic peptide
QQSYYYPST

SEQ ID NO: 1334 - protein, 9 aa, Artificial Sequence
  Description of Artificial Sequence: Synthetic peptide
  MOD_RES (3)..(6): Variable amino acid
  MOD_RES (8)..(8): Variable amino acid
QQXXXXPXT

SEQ ID NO: 1335 - protein, 9 aa, Artificial Sequence
  Description of Artificial Sequence: Synthetic peptide
QQSSYYPST

SEQ ID NO: 1336 - protein, 9 aa, Artificial Sequence
  Description of Artificial Sequence: Synthetic peptide
QQYYSSPYT

SEQ ID NO: 1337 - protein, 9 aa, Artificial Sequence
  Description of Artificial Sequence: Synthetic peptide
QQYYSSPYT

SEQ ID NO: 1338 - protein, 9 aa, Artificial Sequence
  Description of Artificial Sequence: Synthetic peptide
QQSYSSPST

SEQ ID NO: 1339 - protein, 9 aa, Artificial Sequence
  Description of Artificial Sequence: Synthetic peptide
QQSYSSPYT

SEQ ID NO: 1340 - protein, 10 aa, Artificial Sequence
  Description of Artificial Sequence: Synthetic peptide
GFSISYSSIH

SEQ ID NO: 1341 - protein, 10 aa, Artificial Sequence
  Description of Artificial Sequence: Synthetic peptide
GFSISYSSIH

SEQ ID NO: 1342 - protein, 10 aa, Artificial Sequence
  Description of Artificial Sequence: Synthetic peptide
GFYIYSYSIH

SEQ ID NO: 1343 - protein, 10 aa, Artificial Sequence
  Description of Artificial Sequence: Synthetic peptide
GFSIYSYSIH

SEQ ID NO: 1344 - protein, 10 aa, Artificial Sequence
  Description of Artificial Sequence: Synthetic peptide
GFYIYSYSIH

SEQ ID NO: 1345 - protein, 10 aa, Artificial Sequence
  Description of Artificial Sequence: Synthetic peptide
GFYIYSYSIH

SEQ ID NO: 1346 - protein, 10 aa, Artificial Sequence
  Description of Artificial Sequence: Synthetic peptide
GFYIYSYSIH

SEQ ID NO: 1347 - protein, 10 aa, Artificial Sequence
  Description of Artificial Sequence: Synthetic peptide
GFSIYYYSIH

SEQ ID NO: 1348 - protein, 10 aa, Artificial Sequence
  Description of Artificial Sequence: Synthetic peptide
GFSISYSSIH

SEQ ID NO: 1349 - protein, 10 aa, Artificial Sequence
  Description of Artificial Sequence: Synthetic peptide
GFYISYYSIH

SEQ ID NO: 1350 - protein, 10 aa, Artificial Sequence
  Description of Artificial Sequence: Synthetic peptide
GFSIYSYSIH

SEQ ID NO: 1351 - protein, 10 aa, Artificial Sequence
  Description of Artificial Sequence: Synthetic peptide
GFSIYSYSIH

SEQ ID NO: 1352 - protein, 10 aa, Artificial Sequence
  Description of Artificial Sequence: Synthetic peptide
GFSISSYSIH

SEQ ID NO: 1353 - protein, 10 aa, Artificial Sequence
  Description of Artificial Sequence: Synthetic peptide
GFYIYSYSIH

SEQ ID NO: 1354 - protein, 10 aa, Artificial Sequence
  Description of Artificial Sequence: Synthetic peptide
GFSISYYSIH

SEQ ID NO: 1355 - protein, 10 aa, Artificial Sequence
  Description of Artificial Sequence: Synthetic peptide
GFYIYSYSIH

SEQ ID NO: 1356 - protein, 10 aa, Artificial Sequence
  Description of Artificial Sequence: Synthetic peptide
GFYIYSYSIH

SEQ ID NO: 1357 - protein, 10 aa, Artificial Sequence
  Description of Artificial Sequence: Synthetic peptide
GFYIYSYSIH

SEQ ID NO: 1358 - protein, 10 aa, Artificial Sequence
  Description of Artificial Sequence: Synthetic peptide
GFYIYSYSIH

SEQ ID NO: 1359 - protein, 10 aa, Artificial Sequence
  Description of Artificial Sequence: Synthetic peptide
GFYIYSYSIH

SEQ ID NO: 1360 - protein, 10 aa, Artificial Sequence
  Description of Artificial Sequence: Synthetic peptide
GFSIYSYSIH

SEQ ID NO: 1361 - protein, 10 aa, Artificial Sequence
  Description of Artificial Sequence: Synthetic peptide
GFSIYSYSIH

SEQ ID NO: 1362 - protein, 10 aa, Artificial Sequence
  Description of Artificial Sequence: Synthetic peptide
GFSIYSYSIH

SEQ ID NO: 1363 - protein, 10 aa, Artificial Sequence
  Description of Artificial Sequence: Synthetic peptide
GFSIYSYSIH

SEQ ID NO: 1364 - protein, 10 aa, Artificial Sequence
  Description of Artificial Sequence: Synthetic peptide
GFSIYYYSIH

SEQ ID NO: 1365 - protein, 10 aa, Artificial Sequence
  Description of Artificial Sequence: Synthetic peptide
GFSISYYSIH

SEQ ID NO: 1366 - protein, 10 aa, Artificial Sequence
  Description of Artificial Sequence: Synthetic peptide
GFYISYYSIH

SEQ ID NO: 1367 - protein, 10 aa, Artificial Sequence
  Description of Artificial Sequence: Synthetic peptide
GFYIYSYSIH

SEQ ID NO: 1368 - protein, 10 aa, Artificial Sequence
  Description of Artificial Sequence: Synthetic peptide
GFSIYSYSIH

SEQ ID NO: 1369 - protein, 10 aa, Artificial Sequence
  Description of Artificial Sequence: Synthetic peptide
GFYIYYYSIH

SEQ ID NO: 1370 - protein, 10 aa, Artificial Sequence
  Description of Artificial Sequence: Synthetic peptide
GFSIYSYSIH

SEQ ID NO: 1371 - protein, 10 aa, Artificial Sequence
  Description of Artificial Sequence: Synthetic peptide
GFYISYYSIH

SEQ ID NO: 1372 - protein, 10 aa, Artificial Sequence
  Description of Artificial Sequence: Synthetic peptide
GFYIYSYSIH

SEQ ID NO: 1373 - protein, 10 aa, Artificial Sequence
  Description of Artificial Sequence: Synthetic peptide
GFSIYYYSIH

SEQ ID NO: 1374 - protein, 10 aa, Artificial Sequence
  Description of Artificial Sequence: Synthetic peptide
GFYIYSYSIH

SEQ ID NO: 1375 - protein, 10 aa, Artificial Sequence
  Description of Artificial Sequence: Synthetic peptide
GFSIYSYSIH

SEQ ID NO: 1376 - protein, 10 aa, Artificial Sequence
  Description of Artificial Sequence: Synthetic peptide
GFYIYSYSIH

SEQ ID NO: 1377 - protein, 10 aa, Artificial Sequence
  Description of Artificial Sequence: Synthetic peptide
GFSIYSYSIH

SEQ ID NO: 1378 - protein, 10 aa, Artificial Sequence
  Description of Artificial Sequence: Synthetic peptide
GFYIYYYSIH

SEQ ID NO: 1379 - protein, 10 aa, Artificial Sequence
  Description of Artificial Sequence: Synthetic peptide
GFSIYYYSIH

SEQ ID NO: 1380 - protein, 10 aa, Artificial Sequence
  Description of Artificial Sequence: Synthetic peptide
GFYIYSYSIH

SEQ ID NO: 1381 - protein, 10 aa, Artificial Sequence
  Description of Artificial Sequence: Synthetic peptide
GFYIYSYSIH

SEQ ID NO: 1382 - protein, 10 aa, Artificial Sequence
  Description of Artificial Sequence: Synthetic peptide
GFYIYYYSIH

SEQ ID NO: 1383 - protein, 10 aa, Artificial Sequence
  Description of Artificial Sequence: Synthetic peptide
GFSIYYYSIH

SEQ ID NO: 1384 - protein, 10 aa, Artificial Sequence
  Description of Artificial Sequence: Synthetic peptide
GFYIYSYSIH

SEQ ID NO: 1385 - protein, 10 aa, Artificial Sequence
  Description of Artificial Sequence: Synthetic peptide
GFYIYSYSIH

SEQ ID NO: 1386 - protein, 10 aa, Artificial Sequence
  Description of Artificial Sequence: Synthetic peptide
GFSIYSYSIH

SEQ ID NO: 1387 - protein, 10 aa, Artificial Sequence
  Description of Artificial Sequence: Synthetic peptide
GFSIYYYSIH

SEQ ID NO: 1388 - protein, 10 aa, Artificial Sequence
  Description of Artificial Sequence: Synthetic peptide
GFSISYYSIH

SEQ ID NO: 1389 - protein, 10 aa, Artificial Sequence
  Description of Artificial Sequence: Synthetic peptide
GFSIYSYSIH

SEQ ID NO: 1390 - protein, 10 aa, Artificial Sequence
  Description of Artificial Sequence: Synthetic peptide
GFYIYSYSIH

SEQ ID NO: 1391 - protein, 10 aa, Artificial Sequence
  Description of Artificial Sequence: Synthetic peptide
GFSIYSYSIH

SEQ ID NO: 1392 - protein, 10 aa, Artificial Sequence
  Description of Artificial Sequence: Synthetic peptide
GFYIYSYSIH

SEQ ID NO: 1393 - protein, 10 aa, Artificial Sequence
  Description of Artificial Sequence: Synthetic peptide
GFSISYYSIH

SEQ ID NO: 1394 - protein, 10 aa, Artificial Sequence
  Description of Artificial Sequence: Synthetic peptide
GFYIYSYSIH

SEQ ID NO: 1395 - protein, 10 aa, Artificial Sequence
  Description of Artificial Sequence: Synthetic peptide
GFSIYSYSIH

SEQ ID NO: 1396 - protein, 10 aa, Artificial Sequence
  Description of Artificial Sequence: Synthetic peptide
GFSIYYYSIH

SEQ ID NO: 1397 - protein, 17 aa, Artificial Sequence
  Description of Artificial Sequence: Synthetic peptide
SIYPYSGYTSYADSVKG

SEQ ID NO: 1398 - protein, 17 aa, Artificial Sequence
  Description of Artificial Sequence: Synthetic peptide
SISPSYGSTSYADSVKG

SEQ ID NO: 1399 - protein, 17 aa, Artificial Sequence
  Description of Artificial Sequence: Synthetic peptide
SISPYYGYTSYADSVKG

SEQ ID NO: 1400 - protein, 17 aa, Artificial Sequence
  Description of Artificial Sequence: Synthetic peptide
SISPYYGYTSYADSVKG

SEQ ID NO: 1401 - protein, 17 aa, Artificial Sequence
  Description of Artificial Sequence: Synthetic peptide
SISPYYGYTSYADSVKG

SEQ ID NO: 1402 - protein, 17 aa, Artificial Sequence
  Description of Artificial Sequence: Synthetic peptide
SISPYYGYTYYADSVKG

SEQ ID NO: 1403 - protein, 17 aa, Artificial Sequence
  Description of Artificial Sequence: Synthetic peptide
SISPYYGYTSYADSVKG

SEQ ID NO: 1404 - protein, 17 aa, Artificial Sequence
  Description of Artificial Sequence: Synthetic peptide
SISPYYGYTYYADSVKG

SEQ ID NO: 1405 - protein, 17 aa, Artificial Sequence
  Description of Artificial Sequence: Synthetic peptide
YISPYSGSTSYADSVKG

SEQ ID NO: 1406 - protein, 17 aa, Artificial Sequence
  Description of Artificial Sequence: Synthetic peptide
SISPYYGYTSYADSVKG

SEQ ID NO: 1407 - protein, 17 aa, Artificial Sequence
  Description of Artificial Sequence: Synthetic peptide
SISPYYGYTSYADSVKG

SEQ ID NO: 1408 - protein, 17 aa, Artificial Sequence
  Description of Artificial Sequence: Synthetic peptide
YISPYYGYTSYADSVKG

SEQ ID NO: 1409 - protein, 17 aa, Artificial Sequence
  Description of Artificial Sequence: Synthetic peptide
YISPYYGYTSYADSVKG

SEQ ID NO: 1410 - protein, 17 aa, Artificial Sequence
  Description of Artificial Sequence: Synthetic peptide
SISPYYGYTSYADSVKG

SEQ ID NO: 1411 - protein, 17 aa, Artificial Sequence
  Description of Artificial Sequence: Synthetic peptide
YISPYYGYTSYADSVKG

SEQ ID NO: 1412 - protein, 17 aa, Artificial Sequence
  Description of Artificial Sequence: Synthetic peptide
SISPYYGYTSYADSVKG

SEQ ID NO: 1413 - protein, 17 aa, Artificial Sequence
  Description of Artificial Sequence: Synthetic peptide
SISPYYGYTSYADSVKG

SEQ ID NO: 1414 - protein, 17 aa, Artificial Sequence
  Description of Artificial Sequence: Synthetic peptide
SISPYYGSTSYADSVKG

SEQ ID NO: 1415 - protein, 17 aa, Artificial Sequence
  Description of Artificial Sequence: Synthetic peptide
SISPYYGYTSYADSVKG

SEQ ID NO: 1416 - protein, 17 aa, Artificial Sequence
  Description of Artificial Sequence: Synthetic peptide
SISPYYGYTSYADSVKG

SEQ ID NO: 1417 - protein, 17 aa, Artificial Sequence
  Description of Artificial Sequence: Synthetic peptide
SISPYYGSTSYADSVKG

SEQ ID NO: 1418 - protein, 17 aa, Artificial Sequence
  Description of Artificial Sequence: Synthetic peptide
SISPYYGYTSYADSVKG

SEQ ID NO: 1419 - protein, 17 aa, Artificial Sequence
  Description of Artificial Sequence: Synthetic peptide
YISPYYGYTYYADSVKG

SEQ ID NO: 1420 - protein, 17 aa, Artificial Sequence
  Description of Artificial Sequence: Synthetic peptide
SISPYYGYTSYADSVKG

SEQ ID NO: 1421 - protein, 17 aa, Artificial Sequence
  Description of Artificial Sequence: Synthetic peptide
SISPYYGYTYYADSVKG

SEQ ID NO: 1422 - protein, 17 aa, Artificial Sequence
  Description of Artificial Sequence: Synthetic peptide
SISPYYGYTSYADSVKG

SEQ ID NO: 1423 - protein, 17 aa, Artificial Sequence
  Description of Artificial Sequence: Synthetic peptide
SISPYYGSTSYADSVKG

SEQ ID NO: 1424 - protein, 17 aa, Artificial Sequence
  Description of Artificial Sequence: Synthetic peptide
SISPYYGYTSYADSVKG

SEQ ID NO: 1425 - protein, 17 aa, Artificial Sequence
  Description of Artificial Sequence: Synthetic peptide
SISPYYGYTSYADSVKG

SEQ ID NO: 1426 - protein, 17 aa, Artificial Sequence
  Description of Artificial Sequence: Synthetic peptide
SISPYYGYTSYADSVKG

SEQ ID NO: 1427 - protein, 17 aa, Artificial Sequence
  Description of Artificial Sequence: Synthetic peptide
SISPYYGYTSYADSVKG

SEQ ID NO: 1428 - protein, 17 aa, Artificial Sequence
  Description of Artificial Sequence: Synthetic peptide
SISPYYGYTYYADSVKG

SEQ ID NO: 1429 - protein, 17 aa, Artificial Sequence
  Description of Artificial Sequence: Synthetic peptide
SISPYYGYTSYADSVKG

SEQ ID NO: 1430 - protein, 17 aa, Artificial Sequence
  Description of Artificial Sequence: Synthetic peptide
SISPYYGSTSYADSVKG

SEQ ID NO: 1431 - protein, 17 aa, Artificial Sequence
  Description of Artificial Sequence: Synthetic peptide
SISPYYGYTSYADSVKG

SEQ ID NO: 1432 - protein, 17 aa, Artificial Sequence
  Description of Artificial Sequence: Synthetic peptide
YISPYYGYTSYADSVKG

SEQ ID NO: 1433 - protein, 17 aa, Artificial Sequence
  Description of Artificial Sequence: Synthetic peptide
SISPYYGSTSYADSVKG

SEQ ID NO: 1434 - protein, 17 aa, Artificial Sequence
  Description of Artificial Sequence: Synthetic peptide
SISPYYGYTSYADSVKG

SEQ ID NO: 1435 - protein, 17 aa, Artificial Sequence
  Description of Artificial Sequence: Synthetic peptide
SISPYYGSTSYADSVKG

SEQ ID NO: 1436 - protein, 17 aa, Artificial Sequence
  Description of Artificial Sequence: Synthetic peptide
SISPYYGYTSYADSVKG

SEQ ID NO: 1437 - protein, 17 aa, Artificial Sequence
  Description of Artificial Sequence: Synthetic peptide
YISPYYGYTYYADSVKG

SEQ ID NO: 1438 - protein, 17 aa, Artificial Sequence
  Description of Artificial Sequence: Synthetic peptide
SISPYYGYTSYADSVKG

SEQ ID NO: 1439 - protein, 17 aa, Artificial Sequence
  Description of Artificial Sequence: Synthetic peptide
SISPYYGYTSYADSVKG

SEQ ID NO: 1440 - protein, 17 aa, Artificial Sequence
  Description of Artificial Sequence: Synthetic peptide
SISPYYGYTSYADSVKG

SEQ ID NO: 1441 - protein, 17 aa, Artificial Sequence
  Description of Artificial Sequence: Synthetic peptide
SISPYYGYTSYADSVKG

SEQ ID NO: 1442 - protein, 17 aa, Artificial Sequence
  Description of Artificial Sequence: Synthetic peptide
YISPYYGYTYYADSVKG

SEQ ID NO: 1443 - protein, 17 aa, Artificial Sequence
  Description of Artificial Sequence: Synthetic peptide
SISPYYGYTSYADSVKG

SEQ ID NO: 1444 - protein, 17 aa, Artificial Sequence
  Description of Artificial Sequence: Synthetic peptide
SISPYYGYTSYADSVKG

SEQ ID NO: 1445 - protein, 17 aa, Artificial Sequence
  Description of Artificial Sequence: Synthetic peptide
SISPYYGYTSYADSVKG

SEQ ID NO: 1446 - protein, 17 aa, Artificial Sequence
  Description of Artificial Sequence: Synthetic peptide
SISPYYGYTSYADSVKG

SEQ ID NO: 1447 - protein, 17 aa, Artificial Sequence
  Description of Artificial Sequence: Synthetic peptide
SISPYYGSTSYADSVKG

SEQ ID NO: 1448 - protein, 17 aa, Artificial Sequence
  Description of Artificial Sequence: Synthetic peptide
SISPYYGYTSYADSVKG

SEQ ID NO: 1449 - protein, 17 aa, Artificial Sequence
  Description of Artificial Sequence: Synthetic peptide
SISPYYGYTSYADSVKG

SEQ ID NO: 1450 - protein, 17 aa, Artificial Sequence
  Description of Artificial Sequence: Synthetic peptide
SISPYYGYTSYADSVKG

SEQ ID NO: 1451 - protein, 17 aa, Artificial Sequence
  Description of Artificial Sequence: Synthetic peptide
SISPYYGSTSYADSVKG

SEQ ID NO: 1452 - protein, 17 aa, Artificial Sequence
  Description of Artificial Sequence: Synthetic peptide
SISPYYGYTSYADSVKG

SEQ ID NO: 1453 - protein, 17 aa, Artificial Sequence
  Description of Artificial Sequence: Synthetic peptide
SISPYYGYTSYADSVKG

SEQ ID NO: 1454 - protein, 11 aa, Artificial Sequence
  Description of Artificial Sequence: Synthetic peptide
WWWWSSSWSAL

SEQ ID NO: 1455 - protein, 14 aa, Artificial Sequence
  Description of Artificial Sequence: Synthetic peptide
SSFFFFFFSSFSAF

SEQ ID NO: 1456 - protein, 13 aa, Artificial Sequence
  Description of Artificial Sequence: Synthetic peptide
YSYSYSSYSYSAL

SEQ ID NO: 1457 - protein, 13 aa, Artificial Sequence
  Description of Artificial Sequence: Synthetic peptide
YSYSYSSYSYSGL

SEQ ID NO: 1458 - protein, 13 aa, Artificial Sequence
  Description of Artificial Sequence: Synthetic peptide
YYYSYSSYSSSGL

SEQ ID NO: 1459 - protein, 13 aa, Artificial Sequence
  Description of Artificial Sequence: Synthetic peptide
YSYSYSSYSYSGM

SEQ ID NO: 1460 - protein, 13 aa, Artificial Sequence
  Description of Artificial Sequence: Synthetic peptide
YYYSYSSYSSSAL

SEQ ID NO: 1461 - protein, 13 aa, Artificial Sequence
  Description of Artificial Sequence: Synthetic peptide
YYYSYSSYSYYAL

SEQ ID NO: 1462 - protein, 14 aa, Artificial Sequence
  Description of Artificial Sequence: Synthetic peptide
YYSYSYYSSYYYGM

SEQ ID NO: 1463 - protein, 14 aa, Artificial Sequence
  Description of Artificial Sequence: Synthetic peptide
YYYYYSSYSYYSGL

SEQ ID NO: 1464 - protein, 14 aa, Artificial Sequence
  Description of Artificial Sequence: Synthetic peptide
YYYYYSYSSYYYGL

SEQ ID NO: 1465 - protein, 14 aa, Artificial Sequence
  Description of Artificial Sequence: Synthetic peptide
YYYSYSSYSYYSGF

SEQ ID NO: 1466 - protein, 14 aa, Artificial Sequence
  Description of Artificial Sequence: Synthetic peptide
YYYSYYSYSYYSGL

SEQ ID NO: 1467 - protein, 14 aa, Artificial Sequence
  Description of Artificial Sequence: Synthetic peptide
YYYSYSSYSYYYGF

SEQ ID NO: 1468 - protein, 14 aa, Artificial Sequence
  Description of Artificial Sequence: Synthetic peptide
YYYSYSSYSYYYGF

SEQ ID NO: 1469 - protein, 14 aa, Artificial Sequence
  Description of Artificial Sequence: Synthetic peptide
YYYSYYSYSSYYGM

SEQ ID NO: 1470 - protein, 14 aa, Artificial Sequence
  Description of Artificial Sequence: Synthetic peptide
YYYSYSYYSSYYAL

SEQ ID NO: 1471 - protein, 14 aa, Artificial Sequence
  Description of Artificial Sequence: Synthetic peptide
YYYSYSSSSSYYGL

SEQ ID NO: 1472 - protein, 14 aa, Artificial Sequence
  Description of Artificial Sequence: Synthetic peptide
YYYSYSSSSSYYGL

SEQ ID NO: 1473 - protein, 14 aa, Artificial Sequence
  Description of Artificial Sequence: Synthetic peptide
YYYSYSYYSSYSGF

SEQ ID NO: 1474 - protein, 14 aa, Artificial Sequence
  Description of Artificial Sequence: Synthetic peptide
YYYSYSSYSYYYGL

SEQ ID NO: 1475 - protein, 14 aa, Artificial Sequence
  Description of Artificial Sequence: Synthetic peptide
YYYSYSSYSSYYGF

SEQ ID NO: 1476 - protein, 14 aa, Artificial Sequence
  Description of Artificial Sequence: Synthetic peptide
YYYSYSSYSYYYGF

SEQ ID NO: 1477 - protein, 14 aa, Artificial Sequence
  Description of Artificial Sequence: Synthetic peptide
YYYSYYYSYSYSGL

SEQ ID NO: 1478 - protein, 14 aa, Artificial Sequence
  Description of Artificial Sequence: Synthetic peptide
YYYSYSSYSSSYGM

SEQ ID NO: 1479 - protein, 14 aa, Artificial Sequence
  Description of Artificial Sequence: Synthetic peptide
YYYSYSSYSSYSGL

SEQ ID NO: 1480 - protein, 14 aa, Artificial Sequence
  Description of Artificial Sequence: Synthetic peptide
YYYSYSSYSYYYGM

SEQ ID NO: 1481 - protein, 14 aa, Artificial Sequence
  Description of Artificial Sequence: Synthetic peptide
YYYSYSSYSYYSGL

SEQ ID NO: 1482 - protein, 14 aa, Artificial Sequence
  Description of Artificial Sequence: Synthetic peptide
YYYSYSSYSYYYGI

SEQ ID NO: 1483 - protein, 14 aa, Artificial Sequence
  Description of Artificial Sequence: Synthetic peptide
YYYSYSSYSYYSGM

SEQ ID NO: 1484 - protein, 14 aa, Artificial Sequence
  Description of Artificial Sequence: Synthetic peptide
YYYSYYSYSYYSAL

SEQ ID NO: 1485 - protein, 14 aa, Artificial Sequence
  Description of Artificial Sequence: Synthetic peptide
YYYSYSSYSSYYGL

SEQ ID NO: 1486 - protein, 14 aa, Artificial Sequence
  Description of Artificial Sequence: Synthetic peptide
YYYSYSYSSSSYGL

SEQ ID NO: 1487 - protein, 14 aa, Artificial Sequence
  Description of Artificial Sequence: Synthetic peptide
YYYSYSSYSYYSGM

SEQ ID NO: 1488 - protein, 14 aa, Artificial Sequence
  Description of Artificial Sequence: Synthetic peptide
YYYSYSSSSYSSAL

SEQ ID NO: 1489 - protein, 14 aa, Artificial Sequence
  Description of Artificial Sequence: Synthetic peptide
YYYSYYSSSSYYGL

SEQ ID NO: 1490 - protein, 14 aa, Artificial Sequence
  Description of Artificial Sequence: Synthetic peptide
YYYSYSSYSSYSGM

SEQ ID NO: 1491 - protein, 14 aa, Artificial Sequence
  Description of Artificial Sequence: Synthetic peptide
YYYSYSSYSYYSGF

SEQ ID NO: 1492 - protein, 14 aa, Artificial Sequence
  Description of Artificial Sequence: Synthetic peptide
YSYSYSSYYSYSGF

SEQ ID NO: 1493 - protein, 14 aa, Artificial Sequence
  Description of Artificial Sequence: Synthetic peptide
YSYSYSSYYYYSAL

SEQ ID NO: 1494 - protein, 14 aa, Artificial Sequence
  Description of Artificial Sequence: Synthetic peptide
SYYSYSSYSSSYGF

SEQ ID NO: 1495 - protein, 14 aa, Artificial Sequence
  Description of Artificial Sequence: Synthetic peptide
SYYSYSSYSYSYGM

SEQ ID NO: 1496 - protein, 14 aa, Artificial Sequence
  Description of Artificial Sequence: Synthetic peptide
SYYSYSYSSYYYGF

SEQ ID NO: 1497 - protein, 14 aa, Artificial Sequence
  Description of Artificial Sequence: Synthetic peptide
SYYSYSSYSSSYGI

SEQ ID NO: 1498 - protein, 14 aa, Artificial Sequence
  Description of Artificial Sequence: Synthetic peptide
SYYSYSSYSSSYGM

SEQ ID NO: 1499 - protein, 14 aa, Artificial Sequence
  Description of Artificial Sequence: Synthetic peptide
SYYSYSSYSSYYGM

SEQ ID NO: 1500 - protein, 14 aa, Artificial Sequence
  Description of Artificial Sequence: Synthetic peptide
SYYSYYSYSYYYGI

SEQ ID NO: 1501 - protein, 14 aa, Artificial Sequence
  Description of Artificial Sequence: Synthetic peptide
SYYSYSSYSSYYAL

SEQ ID NO: 1502 - protein, 15 aa, Artificial Sequence
  Description of Artificial Sequence: Synthetic peptide
YYYSYSYYYSSYYGF

SEQ ID NO: 1503 - protein, 15 aa, Artificial Sequence
  Description of Artificial Sequence: Synthetic peptide
YYYSYSYSSSSYSGL

SEQ ID NO: 1504 - protein, 15 aa, Artificial Sequence
  Description of Artificial Sequence: Synthetic peptide
YYYSYSYYSYYYSAL

SEQ ID NO: 1505 - protein, 15 aa, Artificial Sequence
  Description of Artificial Sequence: Synthetic peptide
YYYSYSYYSSYYYGL

SEQ ID NO: 1506 - protein, 16 aa, Artificial Sequence
  Description of Artificial Sequence: Synthetic peptide
YYYSYSSYSSSSSSAM

SEQ ID NO: 1507 - protein, 16 aa, Artificial Sequence
  Description of Artificial Sequence: Synthetic peptide
YSYSYYSYSYSSSYAF

SEQ ID NO: 1508 - protein, 16 aa, Artificial Sequence
  Description of Artificial Sequence: Synthetic peptide
YYYSYSSYSYSSSSGF

SEQ ID NO: 1509 - protein, 17 aa, Artificial Sequence
  Description of Artificial Sequence: Synthetic peptide
YYYSYSYYYYSSSYSAL

SEQ ID NO: 1510 - protein, 17 aa, Artificial Sequence
  Description of Artificial Sequence: Synthetic peptide
YYYSYSYYSSSSSYSAM

SEQ ID NO: 1511 - protein, 9 aa, Artificial Sequence
  Description of Artificial Sequence: Synthetic peptide
QQSYYSPST

SEQ ID NO: 1512 - protein, 9 aa, Artificial Sequence
  Description of Artificial Sequence: Synthetic peptide
QQSYYSPST

SEQ ID NO: 1513 - protein, 9 aa, Artificial Sequence
  Description of Artificial Sequence: Synthetic peptide
QQSYYYPST

SEQ ID NO: 1514 - protein, 9 aa, Artificial Sequence
  Description of Artificial Sequence: Synthetic peptide
QQSYYSPST

SEQ ID NO: 1515 - protein, 9 aa, Artificial Sequence
  Description of Artificial Sequence: Synthetic peptide
QQSYYSPST

SEQ ID NO: 1516 - protein, 9 aa, Artificial Sequence
  Description of Artificial Sequence: Synthetic peptide
QQYYYSPST

SEQ ID NO: 1517 - protein, 9 aa, Artificial Sequence
  Description of Artificial Sequence: Synthetic peptide
QQSYYYPST

SEQ ID NO: 1518 - protein, 9 aa, Artificial Sequence
  Description of Artificial Sequence: Synthetic peptide
QQSYYYPST

SEQ ID NO: 1519 - protein, 9 aa, Artificial Sequence
  Description of Artificial Sequence: Synthetic peptide
QQSYYSPST

SEQ ID NO: 1520 - protein, 9 aa, Artificial Sequence
  Description of Artificial Sequence: Synthetic peptide
QQSYYSPST

SEQ ID NO: 1521 - protein, 9 aa, Artificial Sequence
  Description of Artificial Sequence: Synthetic peptide
QQSYYYPST

SEQ ID NO: 1522 - protein, 9 aa, Artificial Sequence
  Description of Artificial Sequence: Synthetic peptide
QQYYYSPST

SEQ ID NO: 1523 - protein, 9 aa, Artificial Sequence
  Description of Artificial Sequence: Synthetic peptide
QQSYYYPST

SEQ ID NO: 1524 - protein, 9 aa, Artificial Sequence
  Description of Artificial Sequence: Synthetic peptide
QQYYYYPYT

SEQ ID NO: 1525 - protein, 9 aa, Artificial Sequence
  Description of Artificial Sequence: Synthetic peptide
QQSYYSPST

SEQ ID NO: 1526 - protein, 9 aa, Artificial Sequence
  Description of Artificial Sequence: Synthetic peptide
QQYYYYPST

SEQ ID NO: 1527 - protein, 9 aa, Artificial Sequence
  Description of Artificial Sequence: Synthetic peptide
QQSYYYPST

SEQ ID NO: 1528 - protein, 9 aa, Artificial Sequence
  Description of Artificial Sequence: Synthetic peptide
QQYYYSPST

SEQ ID NO: 1529 - protein, 9 aa, Artificial Sequence
  Description of Artificial Sequence: Synthetic peptide
QQSYYSPST

SEQ ID NO: 1530 - protein, 9 aa, Artificial Sequence
  Description of Artificial Sequence: Synthetic peptide
QQYYYSPST

SEQ ID NO: 1531 - protein, 9 aa, Artificial Sequence
  Description of Artificial Sequence: Synthetic peptide
QQSYYYPST

SEQ ID NO: 1532 - protein, 9 aa, Artificial Sequence
  Description of Artificial Sequence: Synthetic peptide
QQSYYSPST

SEQ ID NO: 1533 - protein, 9 aa, Artificial Sequence
  Description of Artificial Sequence: Synthetic peptide
QQSYYSPST

SEQ ID NO: 1534 - protein, 9 aa, Artificial Sequence
  Description of Artificial Sequence: Synthetic peptide
QQYSYYPYT

SEQ ID NO: 1535 - protein, 9 aa, Artificial Sequence
  Description of Artificial Sequence: Synthetic peptide
QQYSSYPYT

SEQ ID NO: 1536 - protein, 9 aa, Artificial Sequence
  Description of Artificial Sequence: Synthetic peptide
QQYSYYPYT

SEQ ID NO: 1537 - protein, 9 aa, Artificial Sequence
  Description of Artificial Sequence: Synthetic peptide
QQSYSSPYT

SEQ ID NO: 1538 - protein, 10 aa, Artificial Sequence
  Description of Artificial Sequence: Synthetic peptide
GFYISSSYIH

SEQ ID NO: 1539 - protein, 10 aa, Artificial Sequence
  Description of Artificial Sequence: Synthetic peptide
GFYISSSYIH

SEQ ID NO: 1540 - protein, 10 aa, Artificial Sequence
  Description of Artificial Sequence: Synthetic peptide
GFSISSSYIH

SEQ ID NO: 1541 - protein, 10 aa, Artificial Sequence
  Description of Artificial Sequence: Synthetic peptide
GFSISYSYIH

SEQ ID NO: 1542 - protein, 10 aa, Artificial Sequence
  Description of Artificial Sequence: Synthetic peptide
GFSISSSYIH

SEQ ID NO: 1543 - protein, 10 aa, Artificial Sequence
  Description of Artificial Sequence: Synthetic peptide
GFSIYSSYIH

SEQ ID NO: 1544 - protein, 10 aa, Artificial Sequence
  Description of Artificial Sequence: Synthetic peptide
GFSISYSYIH

SEQ ID NO: 1545 - protein, 10 aa, Artificial Sequence
  Description of Artificial Sequence: Synthetic peptide
GFSISSSYIH

SEQ ID NO: 1546 - protein, 10 aa, Artificial Sequence
  Description of Artificial Sequence: Synthetic peptide
GFSIYYSYIH

SEQ ID NO: 1547 - protein, 10 aa, Artificial Sequence
  Description of Artificial Sequence: Synthetic peptide
GFSIYYSYIH

SEQ ID NO: 1548 - protein, 10 aa, Artificial Sequence
  Description of Artificial Sequence: Synthetic peptide
GFSIYSSYIH

SEQ ID NO: 1549 - protein, 10 aa, Artificial Sequence
  Description of Artificial Sequence: Synthetic peptide
GFSISYSYIH

SEQ ID NO: 1550 - protein, 10 aa, Artificial Sequence
  Description of Artificial Sequence: Synthetic peptide
GFSIYYSYIH

SEQ ID NO: 1551 - protein, 10 aa, Artificial Sequence
  Description of Artificial Sequence: Synthetic peptide
GFSIYYSYIH

SEQ ID NO: 1552 - protein, 10 aa, Artificial Sequence
  Description of Artificial Sequence: Synthetic peptide
GFSISSSYIH

SEQ ID NO: 1553 - protein, 10 aa, Artificial Sequence
  Description of Artificial Sequence: Synthetic peptide
GFSISYSYIH

SEQ ID NO: 1554 - protein, 10 aa, Artificial Sequence
  Description of Artificial Sequence: Synthetic peptide
GFYIYSSYIH

SEQ ID NO: 1555 - protein, 10 aa, Artificial Sequence
  Description of Artificial Sequence: Synthetic peptide
GFSISSSYIH

SEQ ID NO: 1556 - protein, 10 aa, Artificial Sequence
  Description of Artificial Sequence: Synthetic peptide
GFSISSSYIH

SEQ ID NO: 1557 - protein, 10 aa, Artificial Sequence
  Description of Artificial Sequence: Synthetic peptide
GFSIYSSYIH

SEQ ID NO: 1558 - protein, 10 aa, Artificial Sequence
  Description of Artificial Sequence: Synthetic peptide
GFSISSSYIH

SEQ ID NO: 1559 - protein, 10 aa, Artificial Sequence
  Description of Artificial Sequence: Synthetic peptide
GFYISYSYIH

SEQ ID NO: 1560 - protein, 10 aa, Artificial Sequence
  Description of Artificial Sequence: Synthetic peptide
GFSISYSYIH

SEQ ID NO: 1561 - protein, 10 aa, Artificial Sequence
  Description of Artificial Sequence: Synthetic peptide
GFSISYSSIH

SEQ ID NO: 1562 - protein, 10 aa, Artificial Sequence
  Description of Artificial Sequence: Synthetic peptide
GFSISYSSIH

SEQ ID NO: 1563 - protein, 10 aa, Artificial Sequence
  Description of Artificial Sequence: Synthetic peptide
GFSISYSSIH

SEQ ID NO: 1564 - protein, 10 aa, Artificial Sequence
  Description of Artificial Sequence: Synthetic peptide
GFSISSSSIH

SEQ ID NO: 1565 - protein, 17 aa, Artificial Sequence
  Description of Artificial Sequence: Synthetic peptide
SIYPYSGYTSYADSVKG

SEQ ID NO: 1566 - protein, 17 aa, Artificial Sequence
  Description of Artificial Sequence: Synthetic peptide
SIYPYSGYTSYADSVKG

SEQ ID NO: 1567 - protein, 17 aa, Artificial Sequence
  Description of Artificial Sequence: Synthetic peptide
SIYPYSGYTSYADSVKG

SEQ ID NO: 1568 - protein, 17 aa, Artificial Sequence
  Description of Artificial Sequence: Synthetic peptide
SIYPYSGYTSYADSVKG

SEQ ID NO: 1569 - protein, 17 aa, Artificial Sequence
  Description of Artificial Sequence: Synthetic peptide
SIYPYSGYTSYADSVKG

SEQ ID NO: 1570 - protein, 17 aa, Artificial Sequence
  Description of Artificial Sequence: Synthetic peptide
SIYPYSGYTSYADSVKG

SEQ ID NO: 1571 - protein, 17 aa, Artificial Sequence
  Description of Artificial Sequence: Synthetic peptide
SIYPSSGYTSYADSVKG

SEQ ID NO: 1572 - protein, 17 aa, Artificial Sequence
  Description of Artificial Sequence: Synthetic peptide
SIYPYSGYTSYADSVKG

SEQ ID NO: 1573 - protein, 17 aa, Artificial Sequence
  Description of Artificial Sequence: Synthetic peptide
SIYPSSGYTSYADSVKG

SEQ ID NO: 1574 - protein, 17 aa, Artificial Sequence
  Description of Artificial Sequence: Synthetic peptide
SIYPSSGYTSYADSVKG

SEQ ID NO: 1575 - protein, 17 aa, Artificial Sequence
  Description of Artificial Sequence: Synthetic peptide
SIYPYSGYTSYADSVKG

SEQ ID NO: 1576 - protein, 17 aa, Artificial Sequence
  Description of Artificial Sequence: Synthetic peptide
SIYPYSGYTSYADSVKG

SEQ ID NO: 1577 - protein, 17 aa, Artificial Sequence
  Description of Artificial Sequence: Synthetic peptide
SIYPSSGYTSYADSVKG

SEQ ID NO: 1578 - protein, 17 aa, Artificial Sequence
  Description of Artificial Sequence: Synthetic peptide
SIYPSSGYTSYADSVKG

SEQ ID NO: 1579 - protein, 17 aa, Artificial Sequence
  Description of Artificial Sequence: Synthetic peptide
SIYPYSGYTSYADSVKG

SEQ ID NO: 1580 - protein, 17 aa, Artificial Sequence
  Description of Artificial Sequence: Synthetic peptide
SIYPYSGYTSYADSVKG

SEQ ID NO: 1581 - protein, 17 aa, Artificial Sequence
  Description of Artificial Sequence: Synthetic peptide
SIYPYSGYTSYADSVKG

SEQ ID NO: 1582 - protein, 17 aa, Artificial Sequence
  Description of Artificial Sequence: Synthetic peptide
SIYPYSGYTSYADSVKG

SEQ ID NO: 1583 - protein, 17 aa, Artificial Sequence
  Description of Artificial Sequence: Synthetic peptide
SIYPYSGYTSYADSVKG

SEQ ID NO: 1584 - protein, 17 aa, Artificial Sequence
  Description of Artificial Sequence: Synthetic peptide
SIYPYSGYTSYADSVKG

SEQ ID NO: 1585 - protein, 17 aa, Artificial Sequence
  Description of Artificial Sequence: Synthetic peptide
SIYPYSGYTSYADSVKG

SEQ ID NO: 1586 - protein, 17 aa, Artificial Sequence
  Description of Artificial Sequence: Synthetic peptide
SIYPYSGYTSYADSVKG

SEQ ID NO: 1587 - protein, 17 aa, Artificial Sequence
  Description of Artificial Sequence: Synthetic peptide
SIYPYSGYTSYADSVKG

SEQ ID NO: 1588 - protein, 17 aa, Artificial Sequence
  Description of Artificial Sequence: Synthetic peptide
SIYPYYGYTYYADSVKG

SEQ ID NO: 1589 - protein, 17 aa, Artificial Sequence
  Description of Artificial Sequence: Synthetic peptide
SIYPYYGYTYYADSVKG

SEQ ID NO: 1590 - protein, 17 aa, Artificial Sequence
  Description of Artificial Sequence: Synthetic peptide
SIYPYYGYTSYADSVKG

SEQ ID NO: 1591 - protein, 17 aa, Artificial Sequence
  Description of Artificial Sequence: Synthetic peptide
YISPSSGYTSYADSVKG

SEQ ID NO: 1592 - protein, 6 aa, Artificial Sequence
  Description of Artificial Sequence: Synthetic peptide
YYSYAF

SEQ ID NO: 1593 - protein, 6 aa, Artificial Sequence
  Description of Artificial Sequence: Synthetic peptide
YYSSGF

SEQ ID NO: 1594 - protein, 6 aa, Artificial Sequence
  Description of Artificial Sequence: Synthetic peptide
YYSSGF

SEQ ID NO: 1595 - protein, 6 aa, Artificial Sequence
  Description of Artificial Sequence: Synthetic peptide
YYSSGF

SEQ ID NO: 1596 - protein, 6 aa, Artificial Sequence
  Description of Artificial Sequence: Synthetic peptide
YYSYAL

SEQ ID NO: 1597 - protein, 6 aa, Artificial Sequence
  Description of Artificial Sequence: Synthetic peptide
WWSSAF

SEQ ID NO: 1598 - protein, 6 aa, Artificial Sequence
  Description of Artificial Sequence: Synthetic peptide
WWSSAM

SEQ ID NO: 1599 - protein, 6 aa, Artificial Sequence
  Description of Artificial Sequence: Synthetic peptide
WWSWGF

SEQ ID NO: 1600 - protein, 6 aa, Artificial Sequence
  Description of Artificial Sequence: Synthetic peptide
WWSSAF

SEQ ID NO: 1601 - protein, 6 aa, Artificial Sequence
  Description of Artificial Sequence: Synthetic peptide
WWSSGF

SEQ ID NO: 1602 - protein, 6 aa, Artificial Sequence
  Description of Artificial Sequence: Synthetic peptide
WWSSAF

SEQ ID NO: 1603 - protein, 6 aa, Artificial Sequence
  Description of Artificial Sequence: Synthetic peptide
WWSWAF

SEQ ID NO: 1604 - protein, 6 aa, Artificial Sequence
  Description of Artificial Sequence: Synthetic peptide
WWSSAF

SEQ ID NO: 1605 - protein, 6 aa, Artificial Sequence
  Description of Artificial Sequence: Synthetic peptide
WWSSAF

SEQ ID NO: 1606 - protein, 6 aa, Artificial Sequence
  Description of Artificial Sequence: Synthetic peptide
WWSSAL

SEQ ID NO: 1607 - protein, 6 aa, Artificial Sequence
  Description of Artificial Sequence: Synthetic peptide
WWSSAF

SEQ ID NO: 1608 - protein, 6 aa, Artificial Sequence
  Description of Artificial Sequence: Synthetic peptide
WWSSGF

SEQ ID NO: 1609 - protein, 6 aa, Artificial Sequence
  Description of Artificial Sequence: Synthetic peptide
WWSSAF

SEQ ID NO: 1610 - protein, 6 aa, Artificial Sequence
  Description of Artificial Sequence: Synthetic peptide
WWSSAL

SEQ ID NO: 1611 - protein, 6 aa, Artificial Sequence
  Description of Artificial Sequence: Synthetic peptide
WSSSGF

SEQ ID NO: 1612 - protein, 6 aa, Artificial Sequence
  Description of Artificial Sequence: Synthetic peptide
WWSSAM

SEQ ID NO: 1613 - protein, 6 aa, Artificial Sequence
  Description of Artificial Sequence: Synthetic peptide
WWSSAL

SEQ ID NO: 1614 - protein, 6 aa, Artificial Sequence
  Description of Artificial Sequence: Synthetic peptide
WWSSAL

SEQ ID NO: 1615 - protein, 10 aa, Artificial Sequence
  Description of Artificial Sequence: Synthetic peptide
FSFSSSSFAM

SEQ ID NO: 1616 - protein, 10 aa, Artificial Sequence
  Description of Artificial Sequence: Synthetic peptide
FSFSSSSFAI

SEQ ID NO: 1617 - protein, 11 aa, Artificial Sequence
  Description of Artificial Sequence: Synthetic peptide
FFFFSSSFFGF

SEQ ID NO: 1618 - protein, 13 aa, Artificial Sequence
  Description of Artificial Sequence: Synthetic peptide
YYSSYYSYYSFGL

SEQ ID NO: 1619 - protein, 9 aa, Artificial Sequence
  Description of Artificial Sequence: Synthetic peptide
QQYSYSPYT

SEQ ID NO: 1620 - protein, 9 aa, Artificial Sequence
  Description of Artificial Sequence: Synthetic peptide
QQYYSSPYT

SEQ ID NO: 1621 - protein, 9 aa, Artificial Sequence
  Description of Artificial Sequence: Synthetic peptide
QQYSYSPYT

SEQ ID NO: 1622 - protein, 9 aa, Artificial Sequence
  Description of Artificial Sequence: Synthetic peptide
QQYSYSPYT

SEQ ID NO: 1623 - protein, 9 aa, Artificial Sequence
  Description of Artificial Sequence: Synthetic peptide
QQYSYSPYT

SEQ ID NO: 1624 - protein, 9 aa, Artificial Sequence
  Description of Artificial Sequence: Synthetic peptide
QQYSYSPYT

SEQ ID NO: 1625 - protein, 9 aa, Artificial Sequence
  Description of Artificial Sequence: Synthetic peptide
QQYSSSPYT

SEQ ID NO: 1626 - protein, 9 aa, Artificial Sequence
  Description of Artificial Sequence: Synthetic peptide
QQYSYSPYT

SEQ ID NO: 1627 - protein, 9 aa, Artificial Sequence
  Description of Artificial Sequence: Synthetic peptide
QQYSYSPYT

SEQ ID NO: 1628 - protein, 9 aa, Artificial Sequence
  Description of Artificial Sequence: Synthetic peptide
QQYSYSPYT

SEQ ID NO: 1629 - protein, 9 aa, Artificial Sequence
  Description of Artificial Sequence: Synthetic peptide
QQYSYSPYT

SEQ ID NO: 1630 - protein, 9 aa, Artificial Sequence
  Description of Artificial Sequence: Synthetic peptide
QQYSSSPYT

SEQ ID NO: 1631 - protein, 9 aa, Artificial Sequence
  Description of Artificial Sequence: Synthetic peptide
QQYSYSPYT

SEQ ID NO: 1632 - protein, 9 aa, Artificial Sequence
  Description of Artificial Sequence: Synthetic peptide
QQYSYSPYT

SEQ ID NO: 1633 - protein, 9 aa, Artificial Sequence
  Description of Artificial Sequence: Synthetic peptide
QQYYSSPYT

SEQ ID NO: 1634 - protein, 9 aa, Artificial Sequence
  Description of Artificial Sequence: Synthetic peptide
QQYSYSPYT

SEQ ID NO: 1635 - protein, 9 aa, Artificial Sequence
  Description of Artificial Sequence: Synthetic peptide
QQYSYSPYT

SEQ ID NO: 1636 - protein, 9 aa, Artificial Sequence
  Description of Artificial Sequence: Synthetic peptide
QQYSYSPYT

SEQ ID NO: 1637 - protein, 9 aa, Artificial Sequence
  Description of Artificial Sequence: Synthetic peptide
QQSYSYPYT

SEQ ID NO: 1638 - protein, 9 aa, Artificial Sequence
  Description of Artificial Sequence: Synthetic peptide
QQSSYSPYT

SEQ ID NO: 1639 - protein, 9 aa, Artificial Sequence
  Description of Artificial Sequence: Synthetic peptide
QQYYYSPYT

SEQ ID NO: 1640 - protein, 9 aa, Artificial Sequence
  Description of Artificial Sequence: Synthetic peptide
QQSYYSPYT

SEQ ID NO: 1641 - protein, 9 aa, Artificial Sequence
  Description of Artificial Sequence: Synthetic peptide
QQYYSSPST

SEQ ID NO: 1642 - protein, 9 aa, Artificial Sequence
  Description of Artificial Sequence: Synthetic peptide
QQYYSYPYT

SEQ ID NO: 1643 - protein, 9 aa, Artificial Sequence
  Description of Artificial Sequence: Synthetic peptide
QQSSYYPST

SEQ ID NO: 1644 - protein, 9 aa, Artificial Sequence
  Description of Artificial Sequence: Synthetic peptide
QQSSYYPST

SEQ ID NO: 1645 - protein, 9 aa, Artificial Sequence
  Description of Artificial Sequence: Synthetic peptide
QQSYYSPYT

SEQ ID NO: 1646 - protein, 9 aa, Artificial Sequence
  Description of Artificial Sequence: Synthetic peptide
QQYYYYPST

SEQ ID NO: 1647 - protein, 9 aa, Artificial Sequence
  Description of Artificial Sequence: Synthetic peptide
QQSYYSPYT

SEQ ID NO: 1648 - protein, 9 aa, Artificial Sequence
  Description of Artificial Sequence: Synthetic peptide
QEYSYSPST

SEQ ID NO: 1649 - protein, 9 aa, Artificial Sequence
  Description of Artificial Sequence: Synthetic peptide
QQSSYYPYT

SEQ ID NO: 1650 - protein, 9 aa, Artificial Sequence
  Description of Artificial Sequence: Synthetic peptide
  MOD_RES (3)..(6): Variable amino acid
  MOD_RES (8)..(8): Variable amino acid
QQXXXXPXT

SEQ ID NO: 1651 - protein, 9 aa, Artificial Sequence
  Description of Artificial Sequence: Synthetic peptide
  MOD_RES (3)..(6): Variable amino acid
  MOD_RES (8)..(8): Variable amino acid
QQXXXXPXT

SEQ ID NO: 1652 - protein, 9 aa, Artificial Sequence
  Description of Artificial Sequence: Synthetic peptide
  MOD_RES (3)..(6): Variable amino acid
  MOD_RES (8)..(8): Variable amino acid
QQXXXXPXT

SEQ ID NO: 1653 - protein, 10 aa, Artificial Sequence
  Description of Artificial Sequence: Synthetic peptide
GFYISYSSIH

SEQ ID NO: 1654 - protein, 10 aa, Artificial Sequence
  Description of Artificial Sequence: Synthetic peptide
GFYISSSSIH

SEQ ID NO: 1655 - protein, 10 aa, Artificial Sequence
  Description of Artificial Sequence: Synthetic peptide
GFSIYYSSIH

SEQ ID NO: 1656 - protein, 10 aa, Artificial Sequence
  Description of Artificial Sequence: Synthetic peptide
GFYISYSSIH

SEQ ID NO: 1657 - protein, 10 aa, Artificial Sequence
  Description of Artificial Sequence: Synthetic peptide
GFYIYYSSIH

SEQ ID NO: 1658 - protein, 10 aa, Artificial Sequence
  Description of Artificial Sequence: Synthetic peptide
GFSISYSSIH

SEQ ID NO: 1659 - protein, 10 aa, Artificial Sequence
  Description of Artificial Sequence: Synthetic peptide
GFSISYSSIH

SEQ ID NO: 1660 - protein, 10 aa, Artificial Sequence
  Description of Artificial Sequence: Synthetic peptide
GFSISYSSIH

SEQ ID NO: 1661 - protein, 10 aa, Artificial Sequence
  Description of Artificial Sequence: Synthetic peptide
GFSISYSSIH

SEQ ID NO: 1662 - protein, 10 aa, Artificial Sequence
  Description of Artificial Sequence: Synthetic peptide
GFSISYSSIH

SEQ ID NO: 1663 - protein, 10 aa, Artificial Sequence
  Description of Artificial Sequence: Synthetic peptide
GFYISSSSIH

SEQ ID NO: 1664 - protein, 10 aa, Artificial Sequence
  Description of Artificial Sequence: Synthetic peptide
GFYISYSSIH

SEQ ID NO: 1665 - protein, 10 aa, Artificial Sequence
  Description of Artificial Sequence: Synthetic peptide
GFSIYYSSIH

SEQ ID NO: 1666 - protein, 10 aa, Artificial Sequence
  Description of Artificial Sequence: Synthetic peptide
GFSIYSSSIH

SEQ ID NO: 1667 - protein, 10 aa, Artificial Sequence
  Description of Artificial Sequence: Synthetic peptide
GFSISYSSIH

SEQ ID NO: 1668 - protein, 10 aa, Artificial Sequence
  Description of Artificial Sequence: Synthetic peptide
GFSIYYSSIH

SEQ ID NO: 1669 - protein, 10 aa, Artificial Sequence
  Description of Artificial Sequence: Synthetic peptide
GFSISSSSIH

SEQ ID NO: 1670 - protein, 10 aa, Artificial Sequence
  Description of Artificial Sequence: Synthetic peptide
GFYISYSSIH

SEQ ID NO: 1671 - protein, 10 aa, Artificial Sequence
  Description of Artificial Sequence: Synthetic peptide
GFYIYSSYIH

SEQ ID NO: 1672 - protein, 10 aa, Artificial Sequence
  Description of Artificial Sequence: Synthetic peptide
GFSIYSSYIH

SEQ ID NO: 1673 - protein, 10 aa, Artificial Sequence
  Description of Artificial Sequence: Synthetic peptide
GFSIYYSSIH

SEQ ID NO: 1674 - protein, 10 aa, Artificial Sequence
  Description of Artificial Sequence: Synthetic peptide
GFYIYYSSIH

SEQ ID NO: 1675 - protein, 10 aa, Artificial Sequence
  Description of Artificial Sequence: Synthetic peptide
GFYIYYSSIH

SEQ ID NO: 1676 - protein, 10 aa, Artificial Sequence
  Description of Artificial Sequence: Synthetic peptide
GFYISSYSIH

SEQ ID NO: 1677 - protein, 10 aa, Artificial Sequence
  Description of Artificial Sequence: Synthetic peptide
GFYISYSYIH

SEQ ID NO: 1678 - protein, 10 aa, Artificial Sequence
  Description of Artificial Sequence: Synthetic peptide
GFSIYSSSIH

SEQ ID NO: 1679 - protein, 10 aa, Artificial Sequence
  Description of Artificial Sequence: Synthetic peptide
GFYIYYSYIH

SEQ ID NO: 1680 - protein, 10 aa, Artificial Sequence
  Description of Artificial Sequence: Synthetic peptide
GFSIYYSYIH

SEQ ID NO: 1681 - protein, 10 aa, Artificial Sequence
  Description of Artificial Sequence: Synthetic peptide
GFYIYYSSIH

SEQ ID NO: 1682 - protein, 10 aa, Artificial Sequence
  Description of Artificial Sequence: Synthetic peptide
GFYIYSSSIH

SEQ ID NO: 1683 - protein, 10 aa, Artificial Sequence
  Description of Artificial Sequence: Synthetic peptide
GFSIYYSSIH

SEQ ID NO: 1684 - protein, 10 aa, Artificial Sequence
  Description of Artificial Sequence: Synthetic peptide
GFSIYSSSIH

SEQ ID NO: 1685 - protein, 10 aa, Artificial Sequence
  Description of Artificial Sequence: Synthetic peptide
GFSISSYSIH

SEQ ID NO: 1686 - protein, 10 aa, Artificial Sequence
  Description of Artificial Sequence: Synthetic peptide
GFSIYSSSIH

SEQ ID NO: 1687 - protein, 17 aa, Artificial Sequence
  Description of Artificial Sequence: Synthetic peptide
SIYPYYGYTSYADSVKG

SEQ ID NO: 1688 - protein, 17 aa, Artificial Sequence
  Description of Artificial Sequence: Synthetic peptide
SIYPYYGYTSYADSVKG

SEQ ID NO: 1689 - protein, 17 aa, Artificial Sequence
  Description of Artificial Sequence: Synthetic peptide
SIYPYYGYTSYADSVKG

SEQ ID NO: 1690 - protein, 17 aa, Artificial Sequence
  Description of Artificial Sequence: Synthetic peptide
SIYPSYGYTSYADSVKG

SEQ ID NO: 1691 - protein, 17 aa, Artificial Sequence
  Description of Artificial Sequence: Synthetic peptide
SIYPSYGYTSYADSVKG

SEQ ID NO: 1692 - protein, 17 aa, Artificial Sequence
  Description of Artificial Sequence: Synthetic peptide
SIYPSYGYTSYADSVKG

SEQ ID NO: 1693 - protein, 17 aa, Artificial Sequence
  Description of Artificial Sequence: Synthetic peptide
SIYPYYGYTSYADSVKG

SEQ ID NO: 1694 - protein, 17 aa, Artificial Sequence
  Description of Artificial Sequence: Synthetic peptide
SIYPYYGYTSYADSVKG

SEQ ID NO: 1695 - protein, 17 aa, Artificial Sequence
  Description of Artificial Sequence: Synthetic peptide
SIYPSYGYTSYADSVKG

SEQ ID NO: 1696 - protein, 17 aa, Artificial Sequence
  Description of Artificial Sequence: Synthetic peptide
SIYPYYGYTSYADSVKG

SEQ ID NO: 1697 - protein, 17 aa, Artificial Sequence
  Description of Artificial Sequence: Synthetic peptide
SIYPYYGYTSYADSVKG

SEQ ID NO: 1698 - protein, 17 aa, Artificial Sequence
  Description of Artificial Sequence: Synthetic peptide
SIYPYYGYTSYADSVKG

SEQ ID NO: 1699 - protein, 17 aa, Artificial Sequence
  Description of Artificial Sequence: Synthetic peptide
SIYPSYGYTSYADSVKG

SEQ ID NO: 1700 - protein, 17 aa, Artificial Sequence
  Description of Artificial Sequence: Synthetic peptide
SIYPYYGYTSYADSVKG

SEQ ID NO: 1701 - protein, 17 aa, Artificial Sequence
  Description of Artificial Sequence: Synthetic peptide
SIYPYYGYTSYADSVKG

SEQ ID NO: 1702 - protein, 17 aa, Artificial Sequence
  Description of Artificial Sequence: Synthetic peptide
SIYPSYGYTSYADSVKG

SEQ ID NO: 1703 - protein, 17 aa, Artificial Sequence
  Description of Artificial Sequence: Synthetic peptide
SIYPYYGYTSYADSVKG

SEQ ID NO: 1704 - protein, 17 aa, Artificial Sequence
  Description of Artificial Sequence: Synthetic peptide
SIYPSYGYTSYADSVKG

SEQ ID NO: 1705 - protein, 17 aa, Artificial Sequence
  Description of Artificial Sequence: Synthetic peptide
SIYPSYGSTSYADSVKG

SEQ ID NO: 1706 - protein, 17 aa, Artificial Sequence
  Description of Artificial Sequence: Synthetic peptide
SISPYSGYTSYADSVKG

SEQ ID NO: 1707 - protein, 17 aa, Artificial Sequence
  Description of Artificial Sequence: Synthetic peptide
YISPYSGYTYYADSVKG

SEQ ID NO: 1708 - protein, 17 aa, Artificial Sequence
  Description of Artificial Sequence: Synthetic peptide
SIYPSYGSTSYADSVKG

SEQ ID NO: 1709 - protein, 17 aa, Artificial Sequence
  Description of Artificial Sequence: Synthetic peptide
SIYPYSGYTYYADSVKG

SEQ ID NO: 1710 - protein, 17 aa, Artificial Sequence
  Description of Artificial Sequence: Synthetic peptide
SIYPYSGYTSYADSVKG

SEQ ID NO: 1711 - protein, 17 aa, Artificial Sequence
  Description of Artificial Sequence: Synthetic peptide
SISPYSGYTYYADSVKG

SEQ ID NO: 1712 - protein, 17 aa, Artificial Sequence
  Description of Artificial Sequence: Synthetic peptide
SISPYYGYTYYADSVKG

SEQ ID NO: 1713 - protein, 17 aa, Artificial Sequence
  Description of Artificial Sequence: Synthetic peptide
SISPSSGYTSYADSVKG

SEQ ID NO: 1714 - protein, 17 aa, Artificial Sequence
  Description of Artificial Sequence: Synthetic peptide
SISPYSGYTSYADSVKG

SEQ ID NO: 1715 - protein, 17 aa, Artificial Sequence
  Description of Artificial Sequence: Synthetic peptide
SISPYYGYTYYADSVKG

SEQ ID NO: 1716 - protein, 17 aa, Artificial Sequence
  Description of Artificial Sequence: Synthetic peptide
SISPSSGYTYYADSVKG

SEQ ID NO: 1717 - protein, 17 aa, Artificial Sequence
  Description of Artificial Sequence: Synthetic peptide
SIYPYSGYTSYADSVKG

SEQ ID NO: 1718 - protein, 17 aa, Artificial Sequence
  Description of Artificial Sequence: Synthetic peptide
SISPYSGSTYYADSVKG

SEQ ID NO: 1719 - protein, 17 aa, Artificial Sequence
  Description of Artificial Sequence: Synthetic peptide
SISPYYGYTSYADSVKG

SEQ ID NO: 1720 - protein, 17 aa, Artificial Sequence
  Description of Artificial Sequence: Synthetic peptide
SISPSYGSTYYADSVKG

SEQ ID NO: 1721 - protein, 6 aa, Artificial Sequence
  Description of Artificial Sequence: Synthetic peptide
RSRRAI

SEQ ID NO: 1722 - protein, 6 aa, Artificial Sequence
  Description of Artificial Sequence: Synthetic peptide
RRRRAL

SEQ ID NO: 1723 - protein, 6 aa, Artificial Sequence
  Description of Artificial Sequence: Synthetic peptide
RRRRAL

SEQ ID NO: 1724 - protein, 6 aa, Artificial Sequence
  Description of Artificial Sequence: Synthetic peptide
RRRRAL

SEQ ID NO: 1725 - protein, 6 aa, Artificial Sequence
  Description of Artificial Sequence: Synthetic peptide
RRRRAI

SEQ ID NO: 1726 - protein, 6 aa, Artificial Sequence
  Description of Artificial Sequence: Synthetic peptide
RRRRAL

SEQ ID NO: 1727 - protein, 6 aa, Artificial Sequence
  Description of Artificial Sequence: Synthetic peptide
RRRRAI

SEQ ID NO: 1728 - protein, 6 aa, Artificial Sequence
  Description of Artificial Sequence: Synthetic peptide
RRSRAI

SEQ ID NO: 1729 - protein, 6 aa, Artificial Sequence
  Description of Artificial Sequence: Synthetic peptide
RRRRAI

SEQ ID NO: 1730 - protein, 6 aa, Artificial Sequence
  Description of Artificial Sequence: Synthetic peptide
RRRRAI

SEQ ID NO: 1731 - protein, 6 aa, Artificial Sequence
  Description of Artificial Sequence: Synthetic peptide
RSRRAI

SEQ ID NO: 1732 - protein, 6 aa, Artificial Sequence
  Description of Artificial Sequence: Synthetic peptide
RRSRAI

SEQ ID NO: 1733 - protein, 6 aa, Artificial Sequence
  Description of Artificial Sequence: Synthetic peptide
RRRRAL

SEQ ID NO: 1734 - protein, 6 aa, Artificial Sequence
  Description of Artificial Sequence: Synthetic peptide
RRRRAL

SEQ ID NO: 1735 - protein, 6 aa, Artificial Sequence
  Description of Artificial Sequence: Synthetic peptide
RRRRAL

SEQ ID NO: 1736 - protein, 6 aa, Artificial Sequence
  Description of Artificial Sequence: Synthetic peptide
RRRRAI

SEQ ID NO: 1737 - protein, 6 aa, Artificial Sequence
  Description of Artificial Sequence: Synthetic peptide
RRRRAI

SEQ ID NO: 1738 - protein, 6 aa, Artificial Sequence
  Description of Artificial Sequence: Synthetic peptide
RRRRGI

SEQ ID NO: 1739 - protein, 9 aa, Artificial Sequence
  Description of Artificial Sequence: Synthetic peptide
SWWWSWSAL

SEQ ID NO: 1740 - protein, 10 aa, Artificial Sequence
  Description of Artificial Sequence: Synthetic peptide
RSRSRRRRAF

SEQ ID NO: 1741 - protein, 11 aa, Artificial Sequence
  Description of Artificial Sequence: Synthetic peptide
RSRSRRRRSGM

SEQ ID NO: 1742 - protein, 11 aa, Artificial Sequence
  Description of Artificial Sequence: Synthetic peptide
SRRSSRRRRAM

SEQ ID NO: 1743 - protein, 11 aa, Artificial Sequence
  Description of Artificial Sequence: Synthetic peptide
SSRSRRRSRAI

SEQ ID NO: 1744 - protein, 11 aa, Artificial Sequence
  Description of Artificial Sequence: Synthetic peptide
RSSSRRSSRAF

SEQ ID NO: 1745 - protein, 12 aa, Artificial Sequence
  Description of Artificial Sequence: Synthetic peptide
RRRSSSRRRRGL

SEQ ID NO: 1746 - protein, 13 aa, Artificial Sequence
  Description of Artificial Sequence: Synthetic peptide
SSSSRRRSRRRGM

SEQ ID NO: 1747 - protein, 13 aa, Artificial Sequence
  Description of Artificial Sequence: Synthetic peptide
SRRSSRRSRSRGF

SEQ ID NO: 1748 - protein, 13 aa, Artificial Sequence
  Description of Artificial Sequence: Synthetic peptide
RSRRRRSRSSSAF

SEQ ID NO: 1749 - protein, 13 aa, Artificial Sequence
  Description of Artificial Sequence: Synthetic peptide
SRSRRRSSSRRAF

SEQ ID NO: 1750 - protein, 13 aa, Artificial Sequence
  Description of Artificial Sequence: Synthetic peptide
SSRRSRSRSRRGF

SEQ ID NO: 1751 - protein, 15 aa, Artificial Sequence
  Description of Artificial Sequence: Synthetic peptide
SSSRRRSRSRSRRAM

SEQ ID NO: 1752 - protein, 16 aa, Artificial Sequence
  Description of Artificial Sequence: Synthetic peptide
YSYYYYYSYYYYSYGL

SEQ ID NO: 1753 - protein, 17 aa, Artificial Sequence
  Description of Artificial Sequence: Synthetic peptide
SYYYYSSYYSYYYSSAM

SEQ ID NO: 1754 - protein, 17 aa, Artificial Sequence
  Description of Artificial Sequence: Synthetic peptide
SSYYYSSYYYYYYYSAF

SEQ ID NO: 1755 - protein, 9 aa, Artificial Sequence
  Description of Artificial Sequence: Synthetic peptide
QQYSSYPYT

SEQ ID NO: 1756 - protein, 9 aa, Artificial Sequence
  Description of Artificial Sequence: Synthetic peptide
QQYYYSPYT

SEQ ID NO: 1757 - protein, 9 aa, Artificial Sequence
  Description of Artificial Sequence: Synthetic peptide
QQYSSSPYT

SEQ ID NO: 1758 - protein, 9 aa, Artificial Sequence
  Description of Artificial Sequence: Synthetic peptide
QQYYSYPYT

SEQ ID NO: 1759 - protein, 9 aa, Artificial Sequence
  Description of Artificial Sequence: Synthetic peptide
QQYYSYPST

SEQ ID NO: 1760 - protein, 9 aa, Artificial Sequence
  Description of Artificial Sequence: Synthetic peptide
QQYYSYPST

SEQ ID NO: 1761 - protein, 9 aa, Artificial Sequence
  Description of Artificial Sequence: Synthetic peptide
QQYYSYPYT

SEQ ID NO: 1762 - protein, 9 aa, Artificial Sequence
  Description of Artificial Sequence: Synthetic peptide
QQYYSYPST

SEQ ID NO: 1763 - protein, 9 aa, Artificial Sequence
  Description of Artificial Sequence: Synthetic peptide
QQYYSYPST

SEQ ID NO: 1764 - protein, 9 aa, Artificial Sequence
  Description of Artificial Sequence: Synthetic peptide
QQSYYYPST

SEQ ID NO: 1765 - protein, 9 aa, Artificial Sequence
  Description of Artificial Sequence: Synthetic peptide
QQSYYYPST

SEQ ID NO: 1766 - protein, 9 aa, Artificial Sequence
  Description of Artificial Sequence: Synthetic peptide
QQSYYYPYT

SEQ ID NO: 1767 - protein, 9 aa, Artificial Sequence
  Description of Artificial Sequence: Synthetic peptide
QQYYYYPST

SEQ ID NO: 1768 - protein, 9 aa, Artificial Sequence
  Description of Artificial Sequence: Synthetic peptide
QQSYSYPST

SEQ ID NO: 1769 - protein, 9 aa, Artificial Sequence
  Description of Artificial Sequence: Synthetic peptide
QQYYSSPYT

SEQ ID NO: 1770 - protein, 9 aa, Artificial Sequence
  Description of Artificial Sequence: Synthetic peptide
QQYYYSPYT

SEQ ID NO: 1771 - protein, 9 aa, Artificial Sequence
  Description of Artificial Sequence: Synthetic peptide
QQYYSYPYT

SEQ ID NO: 1772 - protein, 9 aa, Artificial Sequence
  Description of Artificial Sequence: Synthetic peptide
QQSSYSPYT

SEQ ID NO: 1773 - protein, 9 aa, Artificial Sequence
  Description of Artificial Sequence: Synthetic peptide
QQSSYSPYT

SEQ ID NO: 1774 - protein, 9 aa, Artificial Sequence
  Description of Artificial Sequence: Synthetic peptide
QQSSYSPYT

SEQ ID NO: 1775 - protein, 9 aa, Artificial Sequence
  Description of Artificial Sequence: Synthetic peptide
QQSSYSPYT

SEQ ID NO: 1776 - protein, 9 aa, Artificial Sequence
  Description of Artificial Sequence: Synthetic peptide
QQSYYYPST

SEQ ID NO: 1777 - protein, 9 aa, Artificial Sequence
  Description of Artificial Sequence: Synthetic peptide
QQSSYSPYT

SEQ ID NO: 1778 - protein, 9 aa, Artificial Sequence
  Description of Artificial Sequence: Synthetic peptide
QQSYSSPST

SEQ ID NO: 1779 - protein, 9 aa, Artificial Sequence
  Description of Artificial Sequence: Synthetic peptide
QQSSYSPYT

SEQ ID NO: 1780 - protein, 9 aa, Artificial Sequence
  Description of Artificial Sequence: Synthetic peptide
QQSYSYPST

SEQ ID NO: 1781 - protein, 9 aa, Artificial Sequence
  Description of Artificial Sequence: Synthetic peptide
QQSYYSPYT

SEQ ID NO: 1782 - protein, 9 aa, Artificial Sequence
  Description of Artificial Sequence: Synthetic peptide
QQSYSSPYT

SEQ ID NO: 1783 - protein, 9 aa, Artificial Sequence
  Description of Artificial Sequence: Synthetic peptide
QQSSYYPYT

SEQ ID NO: 1784 - protein, 9 aa, Artificial Sequence
  Description of Artificial Sequence: Synthetic peptide
QQSYYYPST

SEQ ID NO: 1785 - protein, 9 aa, Artificial Sequence
  Description of Artificial Sequence: Synthetic peptide
QQSYSYPYT

SEQ ID NO: 1786 - protein, 9 aa, Artificial Sequence
  Description of Artificial Sequence: Synthetic peptide
QQYYSSPST

SEQ ID NO: 1787 - protein, 9 aa, Artificial Sequence
  Description of Artificial Sequence: Synthetic peptide
QQSYSYPYT

SEQ ID NO: 1788 - protein, 9 aa, Artificial Sequence
  Description of Artificial Sequence: Synthetic peptide
QQSYSYPYT

SEQ ID NO: 1789 - protein, 9 aa, Artificial Sequence
  Description of Artificial Sequence: Synthetic peptide
QQSSYYPYT

SEQ ID NO: 1790 - protein, 9 aa, Artificial Sequence
  Description of Artificial Sequence: Synthetic peptide
QQSSYYPYT

SEQ ID NO: 1791 - protein, 9 aa, Artificial Sequence
  Description of Artificial Sequence: Synthetic peptide
QQYYYYPYT

SEQ ID NO: 1792 - protein, 9 aa, Artificial Sequence
  Description of Artificial Sequence: Synthetic peptide
QQSYYSPYT

SEQ ID NO: 1793 - protein, 9 aa, Artificial Sequence
  Description of Artificial Sequence: Synthetic peptide
QQYYSYPST

SEQ ID NO: 1794 - protein, 9 aa, Artificial Sequence
  Description of Artificial Sequence: Synthetic peptide
QQSSYYPYT

SEQ ID NO: 1795 - protein, 9 aa, Artificial Sequence
  Description of Artificial Sequence: Synthetic peptide
QQYYSSPST

SEQ ID NO: 1796 - protein, 9 aa, Artificial Sequence
  Description of Artificial Sequence: Synthetic peptide
QQYYSSPST

SEQ ID NO: 1797 - protein, 9 aa, Artificial Sequence
  Description of Artificial Sequence: Synthetic peptide
QQYSYSPST

SEQ ID NO: 1798 - protein, 9 aa, Artificial Sequence
  Description of Artificial Sequence: Synthetic peptide
QQYYYSPST

SEQ ID NO: 1799 - protein, 9 aa, Artificial Sequence
  Description of Artificial Sequence: Synthetic peptide
QQYYSYPST

SEQ ID NO: 1800 - protein, 9 aa, Artificial Sequence
  Description of Artificial Sequence: Synthetic peptide
QQYSYSPST

SEQ ID NO: 1801 - protein, 9 aa, Artificial Sequence
  Description of Artificial Sequence: Synthetic peptide
QQYSYSPST

SEQ ID NO: 1802 - protein, 9 aa, Artificial Sequence
  Description of Artificial Sequence: Synthetic peptide
QQSSSYPYT

SEQ ID NO: 1803 - protein, 9 aa, Artificial Sequence
  Description of Artificial Sequence: Synthetic peptide
QQYSSYPYT

SEQ ID NO: 1804 - protein, 9 aa, Artificial Sequence
  Description of Artificial Sequence: Synthetic peptide
  MOD_RES (3)..(6): Variable amino acid
  MOD_RES (8)..(8): Variable amino acid
QQXXXXPXT

SEQ ID NO: 1805 - protein, 10 aa, Artificial Sequence
  Description of Artificial Sequence: Synthetic peptide
GFSIYYSYIH

SEQ ID NO: 1806 - protein, 10 aa, Artificial Sequence
  Description of Artificial Sequence: Synthetic peptide
GFYIYYSYIH

SEQ ID NO: 1807 - protein, 10 aa, Artificial Sequence
  Description of Artificial Sequence: Synthetic peptide
GFSIYYSYIH

SEQ ID NO: 1808 - protein, 10 aa, Artificial Sequence
  Description of Artificial Sequence: Synthetic peptide
GFSIYYSYIH

SEQ ID NO: 1809 - protein, 10 aa, Artificial Sequence
  Description of Artificial Sequence: Synthetic peptide
GFSIYYSYIH

SEQ ID NO: 1810 - protein, 10 aa, Artificial Sequence
  Description of Artificial Sequence: Synthetic peptide
GFYISYSSIH

SEQ ID NO: 1811 - protein, 10 aa, Artificial Sequence
  Description of Artificial Sequence: Synthetic peptide
GFSISYSYIH

SEQ ID NO: 1812 - protein, 10 aa, Artificial Sequence
  Description of Artificial Sequence: Synthetic peptide
GFSISYYYIH

SEQ ID NO: 1813 - protein, 10 aa, Artificial Sequence
  Description of Artificial Sequence: Synthetic peptide
GFYISYSYIH

SEQ ID NO: 1814 - protein, 10 aa, Artificial Sequence
  Description of Artificial Sequence: Synthetic peptide
GFYISYSYIH

SEQ ID NO: 1815 - protein, 10 aa, Artificial Sequence
  Description of Artificial Sequence: Synthetic peptide
GFYISYSYIH

SEQ ID NO: 1816 - protein, 10 aa, Artificial Sequence
  Description of Artificial Sequence: Synthetic peptide
GFYISYSYIH

SEQ ID NO: 1817 - protein, 10 aa, Artificial Sequence
  Description of Artificial Sequence: Synthetic peptide
GFYISYSYIH

SEQ ID NO: 1818 - protein, 10 aa, Artificial Sequence
  Description of Artificial Sequence: Synthetic peptide
GFSISSSYIH

SEQ ID NO: 1819 - protein, 10 aa, Artificial Sequence
  Description of Artificial Sequence: Synthetic peptide
GFSISYSYIH

SEQ ID NO: 1820 - protein, 10 aa, Artificial Sequence
  Description of Artificial Sequence: Synthetic peptide
GFSIYYSYIH

SEQ ID NO: 1821 - protein, 10 aa, Artificial Sequence
  Description of Artificial Sequence: Synthetic peptide
GFSISSSSIH

SEQ ID NO: 1822 - protein, 10 aa, Artificial Sequence
  Description of Artificial Sequence: Synthetic peptide
GFSIYSSSIH

SEQ ID NO: 1823 - protein, 10 aa, Artificial Sequence
  Description of Artificial Sequence: Synthetic peptide
GFSIYSSSIH

SEQ ID NO: 1824 - protein, 10 aa, Artificial Sequence
  Description of Artificial Sequence: Synthetic peptide
GFYISSSSIH

SEQ ID NO: 1825 - protein, 10 aa, Artificial Sequence
  Description of Artificial Sequence: Synthetic peptide
GFSISYSSIH

SEQ ID NO: 1826 - protein, 10 aa, Artificial Sequence
  Description of Artificial Sequence: Synthetic peptide
GFSISYSSIH

SEQ ID NO: 1827 - protein, 10 aa, Artificial Sequence
  Description of Artificial Sequence: Synthetic peptide
GFYISSSSIH

SEQ ID NO: 1828 - protein, 10 aa, Artificial Sequence
  Description of Artificial Sequence: Synthetic peptide
GFYISYSYIH

SEQ ID NO: 1829 - protein, 10 aa, Artificial Sequence
  Description of Artificial Sequence: Synthetic peptide
GFSISYSYIH

SEQ ID NO: 1830 - protein, 10 aa, Artificial Sequence
  Description of Artificial Sequence: Synthetic peptide
GFSISYSYIH

SEQ ID NO: 1831 - protein, 10 aa, Artificial Sequence
  Description of Artificial Sequence: Synthetic peptide
GFSISYSYIH

SEQ ID NO: 1832 - protein, 10 aa, Artificial Sequence
  Description of Artificial Sequence: Synthetic peptide
GFSISYSYIH

SEQ ID NO: 1833 - protein, 10 aa, Artificial Sequence
  Description of Artificial Sequence: Synthetic peptide
GFSISYSYIH

SEQ ID NO: 1834 - protein, 10 aa, Artificial Sequence
  Description of Artificial Sequence: Synthetic peptide
GFSISYSYIH

SEQ ID NO: 1835 - protein, 10 aa, Artificial Sequence
  Description of Artificial Sequence: Synthetic peptide
GFSIYYSYIH

SEQ ID NO: 1836 - protein, 10 aa, Artificial Sequence
  Description of Artificial Sequence: Synthetic peptide
GFSISYYYIH

SEQ ID NO: 1837 - protein, 10 aa, Artificial Sequence
  Description of Artificial Sequence: Synthetic peptide
GFSISSSYIH

SEQ ID NO: 1838 - protein, 10 aa, Artificial Sequence
  Description of Artificial Sequence: Synthetic peptide
GFSIYSSYIH

SEQ ID NO: 1839 - protein, 10 aa, Artificial Sequence
  Description of Artificial Sequence: Synthetic peptide
GFYISSSYIH

SEQ ID NO: 1840 - protein, 10 aa, Artificial Sequence
  Description of Artificial Sequence: Synthetic peptide
GFYISYSYIH

SEQ ID NO: 1841 - protein, 10 aa, Artificial Sequence
  Description of Artificial Sequence: Synthetic peptide
GFSISYSSIH

SEQ ID NO: 1842 - protein, 10 aa, Artificial Sequence
  Description of Artificial Sequence: Synthetic peptide
GFSISYSYIH

SEQ ID NO: 1843 - protein, 10 aa, Artificial Sequence
  Description of Artificial Sequence: Synthetic peptide
GFSISYSYIH

SEQ ID NO: 1844 - protein, 10 aa, Artificial Sequence
  Description of Artificial Sequence: Synthetic peptide
GFSISSYYIH

SEQ ID NO: 1845 - protein, 10 aa, Artificial Sequence
  Description of Artificial Sequence: Synthetic peptide
GFSISYSSIH

SEQ ID NO: 1846 - protein, 10 aa, Artificial Sequence
  Description of Artificial Sequence: Synthetic peptide
GFYISYSSIH

SEQ ID NO: 1847 - protein, 10 aa, Artificial Sequence
  Description of Artificial Sequence: Synthetic peptide
GFSISSSSIH

SEQ ID NO: 1848 - protein, 10 aa, Artificial Sequence
  Description of Artificial Sequence: Synthetic peptide
GFSISSYSIH

SEQ ID NO: 1849 - protein, 10 aa, Artificial Sequence
  Description of Artificial Sequence: Synthetic peptide
GFYISSYSIH

SEQ ID NO: 1850 - protein, 10 aa, Artificial Sequence
  Description of Artificial Sequence: Synthetic peptide
GFSISYSSIH

SEQ ID NO: 1851 - protein, 10 aa, Artificial Sequence
  Description of Artificial Sequence: Synthetic peptide
GFSISSSSIH

SEQ ID NO: 1852 - protein, 10 aa, Artificial Sequence
  Description of Artificial Sequence: Synthetic peptide
GFSISYYSIH

SEQ ID NO: 1853 - protein, 10 aa, Artificial Sequence
  Description of Artificial Sequence: Synthetic peptide
GFYISYYYIH

SEQ ID NO: 1854 - protein, 10 aa, Artificial Sequence
  Description of Artificial Sequence: Synthetic peptide
GFSIYYYYIH

SEQ ID NO: 1855 - protein, 17 aa, Artificial Sequence
  Description of Artificial Sequence: Synthetic peptide
SISPYYGSTYYADSVKG

SEQ ID NO: 1856 - protein, 17 aa, Artificial Sequence
  Description of Artificial Sequence: Synthetic peptide
SISPYYGSTSYADSVKG

SEQ ID NO: 1857 - protein, 17 aa, Artificial Sequence
  Description of Artificial Sequence: Synthetic peptide
SISPYYGSTSYADSVKG

SEQ ID NO: 1858 - protein, 17 aa, Artificial Sequence
  Description of Artificial Sequence: Synthetic peptide
SISPYYGSTSYADSVKG

SEQ ID NO: 1859 - protein, 17 aa, Artificial Sequence
  Description of Artificial Sequence: Synthetic peptide
YISPYYGSTYYADSVKG

SEQ ID NO: 1860 - protein, 17 aa, Artificial Sequence
  Description of Artificial Sequence: Synthetic peptide
SISPYYGSTSYADSVKG

SEQ ID NO: 1861 - protein, 17 aa, Artificial Sequence
  Description of Artificial Sequence: Synthetic peptide
YISPYYGYTYYADSVKG

SEQ ID NO: 1862 - protein, 17 aa, Artificial Sequence
  Description of Artificial Sequence: Synthetic peptide
SISPYSGSTSYADSVKG

SEQ ID NO: 1863 - protein, 17 aa, Artificial Sequence
  Description of Artificial Sequence: Synthetic peptide
YISPYYGSTSYADSVKG

SEQ ID NO: 1864 - protein, 17 aa, Artificial Sequence
  Description of Artificial Sequence: Synthetic peptide
SISPYSGYTSYADSVKG

SEQ ID NO: 1865 - protein, 17 aa, Artificial Sequence
  Description of Artificial Sequence: Synthetic peptide
SISPYSGSTSYADSVKG

SEQ ID NO: 1866 - protein, 17 aa, Artificial Sequence
  Description of Artificial Sequence: Synthetic peptide
SISPYSGYTSYADSVKG

SEQ ID NO: 1867 - protein, 17 aa, Artificial Sequence
  Description of Artificial Sequence: Synthetic peptide
SISPYSGSTSYADSVKG

SEQ ID NO: 1868 - protein, 17 aa, Artificial Sequence
  Description of Artificial Sequence: Synthetic peptide
SISPYSGSTSYADSVKG

SEQ ID NO: 1869 - protein, 17 aa, Artificial Sequence
  Description of Artificial Sequence: Synthetic peptide
SIYPYSGSTSYADSVKG

SEQ ID NO: 1870 - protein, 17 aa, Artificial Sequence
  Description of Artificial Sequence: Synthetic peptide
SISPSYGYTSYADSVKG

SEQ ID NO: 1871 - protein, 17 aa, Artificial Sequence
  Description of Artificial Sequence: Synthetic peptide
YISPYSGSTSYADSVKG

SEQ ID NO: 1872 - protein, 17 aa, Artificial Sequence
  Description of Artificial Sequence: Synthetic peptide
YIYPYSGSTYYADSVKG

SEQ ID NO: 1873 - protein, 17 aa, Artificial Sequence
  Description of Artificial Sequence: Synthetic peptide
YIYPYSGSTSYADSVKG

SEQ ID NO: 1874 - protein, 17 aa, Artificial Sequence
  Description of Artificial Sequence: Synthetic peptide
YIYPYSGSTSYADSVKG

SEQ ID NO: 1875 - protein, 17 aa, Artificial Sequence
  Description of Artificial Sequence: Synthetic peptide
YIYPYSGSTYYADSVKG

SEQ ID NO: 1876 - protein, 17 aa, Artificial Sequence
  Description of Artificial Sequence: Synthetic peptide
SIYPYSGYTYYADSVKG

SEQ ID NO: 1877 - protein, 17 aa, Artificial Sequence
  Description of Artificial Sequence: Synthetic peptide
YIYPYSGSTYYADSVKG

SEQ ID NO: 1878 - protein, 17 aa, Artificial Sequence
  Description of Artificial Sequence: Synthetic peptide
SIYPYYGYTSYADSVKG

SEQ ID NO: 1879 - protein, 17 aa, Artificial Sequence
  Description of Artificial Sequence: Synthetic peptide
SIYPYYGYTSYADSVKG

SEQ ID NO: 1880 - protein, 17 aa, Artificial Sequence
  Description of Artificial Sequence: Synthetic peptide
SIYPYYGYTSYADSVKG

SEQ ID NO: 1881 - protein, 17 aa, Artificial Sequence
  Description of Artificial Sequence: Synthetic peptide
SIYPYYGYTSYADSVKG

SEQ ID NO: 1882 - protein, 17 aa, Artificial Sequence
  Description of Artificial Sequence: Synthetic peptide
SIYPYYGYTSYADSVKG

SEQ ID NO: 1883 - protein, 17 aa, Artificial Sequence
  Description of Artificial Sequence: Synthetic peptide
SIYPYYGYTSYADSVKG

SEQ ID NO: 1884 - protein, 17 aa, Artificial Sequence
  Description of Artificial Sequence: Synthetic peptide
SIYPYYGYTSYADSVKG

SEQ ID NO: 1885 - protein, 17 aa, Artificial Sequence
  Description of Artificial Sequence: Synthetic peptide
SIYPYYGYTSYADSVKG

SEQ ID NO: 1886 - protein, 17 aa, Artificial Sequence
  Description of Artificial Sequence: Synthetic peptide
SISPYSGYTSYADSVKG

SEQ ID NO: 1887 - protein, 17 aa, Artificial Sequence
  Description of Artificial Sequence: Synthetic peptide
SISPYSGYTSYADSVKG

SEQ ID NO: 1888 - protein, 17 aa, Artificial Sequence
  Description of Artificial Sequence: Synthetic peptide
SISPYSGSTSYADSVKG

SEQ ID NO: 1889 - protein, 17 aa, Artificial Sequence
  Description of Artificial Sequence: Synthetic peptide
SISPYSGSTSYADSVKG

SEQ ID NO: 1890 - protein, 17 aa, Artificial Sequence
  Description of Artificial Sequence: Synthetic peptide
SISPYSGSTSYADSVKG

SEQ ID NO: 1891 - protein, 17 aa, Artificial Sequence
  Description of Artificial Sequence: Synthetic peptide
SISPYYGSTYYADSVKG

SEQ ID NO: 1892 - protein, 17 aa, Artificial Sequence
  Description of Artificial Sequence: Synthetic peptide
SISPYSGSTSYADSVKG

SEQ ID NO: 1893 - protein, 17 aa, Artificial Sequence
  Description of Artificial Sequence: Synthetic peptide
YISPYSGSTSYADSVKG

SEQ ID NO: 1894 - protein, 17 aa, Artificial Sequence
  Description of Artificial Sequence: Synthetic peptide
SISPYSGSTSYADSVKG

SEQ ID NO: 1895 - protein, 17 aa, Artificial Sequence
  Description of Artificial Sequence: Synthetic peptide
YISPYSGSTSYADSVKG

SEQ ID NO: 1896 - protein, 17 aa, Artificial Sequence
  Description of Artificial Sequence: Synthetic peptide
YISPYSGSTSYADSVKG

SEQ ID NO: 1897 - protein, 17 aa, Artificial Sequence
  Description of Artificial Sequence: Synthetic peptide
SISPYSGYTSYADSVKG

SEQ ID NO: 1898 - protein, 17 aa, Artificial Sequence
  Description of Artificial Sequence: Synthetic peptide
SISPYSGYTSYADSVKG

SEQ ID NO: 1899 - protein, 17 aa, Artificial Sequence
  Description of Artificial Sequence: Synthetic peptide
SISPYSGYTSYADSVKG

SEQ ID NO: 1900 - protein, 17 aa, Artificial Sequence
  Description of Artificial Sequence: Synthetic peptide
SISPSYGYTSYADSVKG

SEQ ID NO: 1901 - protein, 17 aa, Artificial Sequence
  Description of Artificial Sequence: Synthetic peptide
SISPYSGYTSYADSVKG

SEQ ID NO: 1902 - protein, 17 aa, Artificial Sequence
  Description of Artificial Sequence: Synthetic peptide
SISPYYGSTSYADSVKG

SEQ ID NO: 1903 - protein, 17 aa, Artificial Sequence
  Description of Artificial Sequence: Synthetic peptide
SISPSSGYTSYADSVKG

SEQ ID NO: 1904 - protein, 17 aa, Artificial Sequence
  Description of Artificial Sequence: Synthetic peptide
SISPYSGSTSYADSVKG

SEQ ID NO: 1905 - protein, 6 aa, Artificial Sequence
  Description of Artificial Sequence: Synthetic peptide
RRSRAM

SEQ ID NO: 1906 - protein, 6 aa, Artificial Sequence
  Description of Artificial Sequence: Synthetic peptide
RRSRGF

SEQ ID NO: 1907 - protein, 6 aa, Artificial Sequence
  Description of Artificial Sequence: Synthetic peptide
RRSRGL

SEQ ID NO: 1908 - protein, 6 aa, Artificial Sequence
  Description of Artificial Sequence: Synthetic peptide
RRSRGF

SEQ ID NO: 1909 - protein, 6 aa, Artificial Sequence
  Description of Artificial Sequence: Synthetic peptide
RRSRGM

SEQ ID NO: 1910 - protein, 6 aa, Artificial Sequence
  Description of Artificial Sequence: Synthetic peptide
SRRRGF

SEQ ID NO: 1911 - protein, 7 aa, Artificial Sequence
  Description of Artificial Sequence: Synthetic peptide
SWSWSAF

SEQ ID NO: 1912 - protein, 7 aa, Artificial Sequence
  Description of Artificial Sequence: Synthetic peptide
SYSYSAM

SEQ ID NO: 1913 - protein, 8 aa, Artificial Sequence
  Description of Artificial Sequence: Synthetic peptide
SSRSRRGM

SEQ ID NO: 1914 - protein, 8 aa, Artificial Sequence
  Description of Artificial Sequence: Synthetic peptide
SSRRSRAL

SEQ ID NO: 1915 - protein, 8 aa, Artificial Sequence
  Description of Artificial Sequence: Synthetic peptide
SSRRSRAM

SEQ ID NO: 1916 - protein, 8 aa, Artificial Sequence
  Description of Artificial Sequence: Synthetic peptide
SRRSSRAF

SEQ ID NO: 1917 - protein, 8 aa, Artificial Sequence
  Description of Artificial Sequence: Synthetic peptide
SRRSSRAM

SEQ ID NO: 1918 - protein, 8 aa, Artificial Sequence
  Description of Artificial Sequence: Synthetic peptide
SRRRSRAM

SEQ ID NO: 1919 - protein, 9 aa, Artificial Sequence
  Description of Artificial Sequence: Synthetic peptide
SFFFFSFGM

SEQ ID NO: 1920 - protein, 9 aa, Artificial Sequence
  Description of Artificial Sequence: Synthetic peptide
SFFSFFSGI

SEQ ID NO: 1921 - protein, 9 aa, Artificial Sequence
  Description of Artificial Sequence: Synthetic peptide
SWWSWWWAL

SEQ ID NO: 1922 - protein, 9 aa, Artificial Sequence
  Description of Artificial Sequence: Synthetic peptide
SWSWWSSAI

SEQ ID NO: 1923 - protein, 9 aa, Artificial Sequence
  Description of Artificial Sequence: Synthetic peptide
SWSWWSSAL

SEQ ID NO: 1924 - protein, 9 aa, Artificial Sequence
  Description of Artificial Sequence: Synthetic peptide
SWSWWSSAM

SEQ ID NO: 1925 - protein, 9 aa, Artificial Sequence
  Description of Artificial Sequence: Synthetic peptide
SWSWWSSAL

SEQ ID NO: 1926 - protein, 9 aa, Artificial Sequence
  Description of Artificial Sequence: Synthetic peptide
WWSSWSSAI

SEQ ID NO: 1927 - protein, 9 aa, Artificial Sequence
  Description of Artificial Sequence: Synthetic peptide
SWSWWSSAL

SEQ ID NO: 1928 - protein, 9 aa, Artificial Sequence
  Description of Artificial Sequence: Synthetic peptide
SRSSRSRAF

SEQ ID NO: 1929 - protein, 9 aa, Artificial Sequence
  Description of Artificial Sequence: Synthetic peptide
SRSRSSRAF

SEQ ID NO: 1930 - protein, 9 aa, Artificial Sequence
  Description of Artificial Sequence: Synthetic peptide
SRSRSSRAF

SEQ ID NO: 1931 - protein, 9 aa, Artificial Sequence
  Description of Artificial Sequence: Synthetic peptide
SRSRSSSAM

SEQ ID NO: 1932 - protein, 9 aa, Artificial Sequence
  Description of Artificial Sequence: Synthetic peptide
SRSRSSRAM

SEQ ID NO: 1933 - protein, 9 aa, Artificial Sequence
  Description of Artificial Sequence: Synthetic peptide
SRSRSRRAF

SEQ ID NO: 1934 - protein, 9 aa, Artificial Sequence
  Description of Artificial Sequence: Synthetic peptide
SRSRRSRAL

SEQ ID NO: 1935 - protein, 9 aa, Artificial Sequence
  Description of Artificial Sequence: Synthetic peptide
SRSRSSSAF

SEQ ID NO: 1936 - protein, 11 aa, Artificial Sequence
  Description of Artificial Sequence: Synthetic peptide
SWSSWSSSWAM

SEQ ID NO: 1937 - protein, 13 aa, Artificial Sequence
  Description of Artificial Sequence: Synthetic peptide
SSSRRRSRSSRGI

SEQ ID NO: 1938 - protein, 13 aa, Artificial Sequence
  Description of Artificial Sequence: Synthetic peptide
SSSRRRSRRSRGI

SEQ ID NO: 1939 - protein, 12 aa, Artificial Sequence
  Description of Artificial Sequence: Synthetic peptide
SRSRRRSSRSAI

SEQ ID NO: 1940 - protein, 12 aa, Artificial Sequence
  Description of Artificial Sequence: Synthetic peptide
SRSRRSSRSSAI

SEQ ID NO: 1941 - protein, 13 aa, Artificial Sequence
  Description of Artificial Sequence: Synthetic peptide
SRSSSSRSRRRAL

SEQ ID NO: 1942 - protein, 13 aa, Artificial Sequence
  Description of Artificial Sequence: Synthetic peptide
SRSRRSRSRSRGF

SEQ ID NO: 1943 - protein, 10 aa, Artificial Sequence
  Description of Artificial Sequence: Synthetic peptide
SPSSSPSSGF

SEQ ID NO: 1944 - protein, 10 aa, Artificial Sequence
  Description of Artificial Sequence: Synthetic peptide
SSWWSSSWGF

SEQ ID NO: 1945 - protein, 11 aa, Artificial Sequence
  Description of Artificial Sequence: Synthetic peptide
SWWWWSSSWAF

SEQ ID NO: 1946 - protein, 11 aa, Artificial Sequence
  Description of Artificial Sequence: Synthetic peptide
SWWWWSSSWAM

SEQ ID NO: 1947 - protein, 14 aa, Artificial Sequence
  Description of Artificial Sequence: Synthetic peptide
FFFFSSFFSSFSGM

SEQ ID NO: 1948 - protein, 14 aa, Artificial Sequence
  Description of Artificial Sequence: Synthetic peptide
FSFFSSFFFSFSGM

SEQ ID NO: 1949 - protein, 14 aa, Artificial Sequence
  Description of Artificial Sequence: Synthetic peptide
FSFFSSFFFSFSGM

SEQ ID NO: 1950 - protein, 14 aa, Artificial Sequence
  Description of Artificial Sequence: Synthetic peptide
FSFFSSSFFSFSGF

SEQ ID NO: 1951 - protein, 14 aa, Artificial Sequence
  Description of Artificial Sequence: Synthetic peptide
FFFSSFFFSFFSAL

SEQ ID NO: 1952 - protein, 17 aa, Artificial Sequence
  Description of Artificial Sequence: Synthetic peptide
SSFFFSSFFSFFFSFGM

SEQ ID NO: 1953 - protein, 16 aa, Artificial Sequence
  Description of Artificial Sequence: Synthetic peptide
SSSYYYSSYYSYSSGF

SEQ ID NO: 1954 - protein, 19 aa, Artificial Sequence
  Description of Artificial Sequence: Synthetic peptide
SYSSYYYYSSYYYSSSSGF

SEQ ID NO: 1955 - protein, 9 aa, Artificial Sequence
  Description of Artificial Sequence: Synthetic peptide
QQYSSYPYT

SEQ ID NO: 1956 - protein, 9 aa, Artificial Sequence
  Description of Artificial Sequence: Synthetic peptide
QQSSYYPST

SEQ ID NO: 1957 - protein, 9 aa, Artificial Sequence
  Description of Artificial Sequence: Synthetic peptide
QQYSYYPYT

SEQ ID NO: 1958 - protein, 9 aa, Artificial Sequence
  Description of Artificial Sequence: Synthetic peptide
QQSSYSPYT

SEQ ID NO: 1959 - protein, 9 aa, Artificial Sequence
  Description of Artificial Sequence: Synthetic peptide
QQSYYSPST

SEQ ID NO: 1960 - protein, 9 aa, Artificial Sequence
  Description of Artificial Sequence: Synthetic peptide
QQYSYYPST

SEQ ID NO: 1961 - protein, 9 aa, Artificial Sequence
  Description of Artificial Sequence: Synthetic peptide
QQSYSYPYT

SEQ ID NO: 1962 - protein, 9 aa, Artificial Sequence
  Description of Artificial Sequence: Synthetic peptide
QQSYSSPYT

SEQ ID NO: 1963 - protein, 10 aa, Artificial Sequence
  Description of Artificial Sequence: Synthetic peptide
GFSISYSYIH

SEQ ID NO: 1964 - protein, 10 aa, Artificial Sequence
  Description of Artificial Sequence: Synthetic peptide
GFSISYSSIH

SEQ ID NO: 1965 - protein, 10 aa, Artificial Sequence
  Description of Artificial Sequence: Synthetic peptide
GFYIYYSSIH

SEQ ID NO: 1966 - protein, 10 aa, Artificial Sequence
  Description of Artificial Sequence: Synthetic peptide
GFSIYYSSIH

SEQ ID NO: 1967 - protein, 10 aa, Artificial Sequence
  Description of Artificial Sequence: Synthetic peptide
GFYISSSYIH

SEQ ID NO: 1968 - protein, 10 aa, Artificial Sequence
  Description of Artificial Sequence: Synthetic peptide
GFYIYYYYIH

SEQ ID NO: 1969 - protein, 10 aa, Artificial Sequence
  Description of Artificial Sequence: Synthetic peptide
GFSIYYSSIH

SEQ ID NO: 1970 - protein, 10 aa, Artificial Sequence
  Description of Artificial Sequence: Synthetic peptide
GFYISYYSIH

SEQ ID NO: 1971 - protein, 17 aa, Artificial Sequence
  Description of Artificial Sequence: Synthetic peptide
SIYPSSGSTSYADSVKG

SEQ ID NO: 1972 - protein, 17 aa, Artificial Sequence
  Description of Artificial Sequence: Synthetic peptide
YISPYYGYTYYADSVKG

SEQ ID NO: 1973 - protein, 17 aa, Artificial Sequence
  Description of Artificial Sequence: Synthetic peptide
SIYPSYGSTSYADSVKG

SEQ ID NO: 1974 - protein, 17 aa, Artificial Sequence
  Description of Artificial Sequence: Synthetic peptide
SIYPYSGSTYYADSVKG

SEQ ID NO: 1975 - protein, 17 aa, Artificial Sequence
  Description of Artificial Sequence: Synthetic peptide
SISPYYGYTSYADSVKG

SEQ ID NO: 1976 - protein, 17 aa, Artificial Sequence
  Description of Artificial Sequence: Synthetic peptide
SISPSYGYTSYADSVKG

SEQ ID NO: 1977 - protein, 17 aa, Artificial Sequence
  Description of Artificial Sequence: Synthetic peptide
SIYPYSGYTSYADSVKG

SEQ ID NO: 1978 - protein, 17 aa, Artificial Sequence
  Description of Artificial Sequence: Synthetic peptide
SISPYYGSTYYADSVKG

SEQ ID NO: 1979 - protein, 11 aa, Artificial Sequence
  Description of Artificial Sequence: Synthetic peptide
WSSWWSWWSAM

SEQ ID NO: 1980 - protein, 12 aa, Artificial Sequence
  Description of Artificial Sequence: Synthetic peptide
SSSWSWWSWWSL

SEQ ID NO: 1981 - protein, 13 aa, Artificial Sequence
  Description of Artificial Sequence: Synthetic peptide
RSRSRSRRRSRAF

SEQ ID NO: 1982 - protein, 13 aa, Artificial Sequence
  Description of Artificial Sequence: Synthetic peptide
RSRRSRRRSSRAL

SEQ ID NO: 1983 - protein, 11 aa, Artificial Sequence
  Description of Artificial Sequence: Synthetic peptide
SSRSRRRRSGI

SEQ ID NO: 1984 - protein, 11 aa, Artificial Sequence
  Description of Artificial Sequence: Synthetic peptide
SSRRSSRSRGF

SEQ ID NO: 1985 - protein, 14 aa, Artificial Sequence
  Description of Artificial Sequence: Synthetic peptide
SSRRSRSRRRSSGM

SEQ ID NO: 1986 - protein, 13 aa, Artificial Sequence
  Description of Artificial Sequence: Synthetic peptide
SRSSRRRSRRRGI

SEQ ID NO: 1987 - DNA, 48 bp, Artificial Sequence
  Description of Artificial Sequence: Synthetic oligonucleotide
gcagcttctggcttctycatttyctyctyctycatacactgggtgcgt

SEQ ID NO: 1988 - DNA, 60 bp, Artificial Sequence
  Description of Artificial Sequence: Synthetic oligonucleotide
ctggaatgggttgcatycatttycccatyctycggttycacttyctatgccgatagcgtc

SEQ ID NO: 1989 - DNA, 54 bp, Artificial Sequence
  Description of Artificial Sequence: Synthetic oligonucleotide
acttattactgtcagcaatyctyctyctycccatycacgttcggacagggtacc

SEQ ID NO: 1990 - DNA, 48 bp, Artificial Sequence
  Description of Artificial Sequence: Synthetic oligonucleotide
gcagcttctggcttcmgcattmgcmgcmgcmgcatacactgggtgcgt

SEQ ID NO: 1991 - DNA, 60 bp, Artificial Sequence
  Description of Artificial Sequence: Synthetic oligonucleotide
ctggaatgggttgcamgcattmgcccamgcmgcggtmgcactmgctatgccgatagcgtc

SEQ ID NO: 1992 - DNA, 54 bp, Artificial Sequence
  Description of Artificial Sequence: Synthetic oligonucleotide
acttattactgtcagcaamgcmgcmgcmgcccamgcacgttcggacagggtacc

SEQ ID NO: 1993 - DNA, 48 bp, Artificial Sequence
  Description of Artificial Sequence: Synthetic oligonucleotide
gcagcttctggcttctsgatttsgtsgtsgtsgatacactgggtgcgt

SEQ ID NO: 1994 - DNA, 60 bp, Artificial Sequence
  Description of Artificial Sequence: Synthetic oligonucleotide
ctggaatgggttgcatsgatttsgccatsgtsgggttsgacttsgtatgccgatagcgtc

SEQ ID NO: 1995 - DNA, 54 bp, Artificial Sequence
  Description of Artificial Sequence: Synthetic oligonucleotide
acttattactgtcagcaatsgtsgtsgtsgccatsgacgttcggacagggtacc

SEQ ID NO: 1996 - protein, 9 aa, Artificial Sequence
  Description of Artificial Sequence: Synthetic peptide
QQYSSYPST

SEQ ID NO: 1997 - protein, 9 aa, Artificial Sequence
  Description of Artificial Sequence: Synthetic peptide
QQYYYYPYT

SEQ ID NO: 1998 - protein, 9 aa, Artificial Sequence
  Description of Artificial Sequence: Synthetic peptide
QQSSYSPYT

SEQ ID NO: 1999 - protein, 9 aa, Artificial Sequence
  Description of Artificial Sequence: Synthetic peptide
QQYSSSPYT

SEQ ID NO: 2000 - protein, 9 aa, Artificial Sequence
  Description of Artificial Sequence: Synthetic peptide
QQSSYSPST

SEQ ID NO: 2001 - protein, 9 aa, Artificial Sequence
  Description of Artificial Sequence: Synthetic peptide
QQSYYSPYT

SEQ ID NO: 2002 - protein, 9 aa, Artificial Sequence
  Description of Artificial Sequence: Synthetic peptide
QQSYYYPST

SEQ ID NO: 2003 - protein, 9 aa, Artificial Sequence
  Description of Artificial Sequence: Synthetic peptide
QQSSSYPST

SEQ ID NO: 2004 - protein, 9 aa, Artificial Sequence
  Description of Artificial Sequence: Synthetic peptide
QQSYYYPST

SEQ ID NO: 2005 - protein, 9 aa, Artificial Sequence
  Description of Artificial Sequence: Synthetic peptide
QQSYYSPYT

SEQ ID NO: 2006 - protein, 9 aa, Artificial Sequence
  Description of Artificial Sequence: Synthetic peptide
QQSSSYPST

SEQ ID NO: 2007 - protein, 9 aa, Artificial Sequence
  Description of Artificial Sequence: Synthetic peptide
QQSYSYPST

SEQ ID NO: 2008 - protein, 9 aa, Artificial Sequence
  Description of Artificial Sequence: Synthetic peptide
QQSYYYPYT

SEQ ID NO: 2009 - protein, 9 aa, Artificial Sequence
  Description of Artificial Sequence: Synthetic peptide
QQSYSYPST

SEQ ID NO: 2010 - protein, 9 aa, Artificial Sequence
  Description of Artificial Sequence: Synthetic peptide
QQSSSSPYT

SEQ ID NO: 2011 - protein, 9 aa, Artificial Sequence
  Description of Artificial Sequence: Synthetic peptide
QQSYYYPST

SEQ ID NO: 2012 - protein, 9 aa, Artificial Sequence
  Description of Artificial Sequence: Synthetic peptide
QQSSYYPST

SEQ ID NO: 2013 - protein, 9 aa, Artificial Sequence
  Description of Artificial Sequence: Synthetic peptide
QQSYYSPYT

SEQ ID NO: 2014 - protein, 9 aa, Artificial Sequence
  Description of Artificial Sequence: Synthetic peptide
QQSSSYPST

SEQ ID NO: 2015 - protein, 9 aa, Artificial Sequence
  Description of Artificial Sequence: Synthetic peptide
QQYYYSPYT

SEQ ID NO: 2016 - protein, 9 aa, Artificial Sequence
  Description of Artificial Sequence: Synthetic peptide
QQYYYSPYT

SEQ ID NO: 2017 - protein, 9 aa, Artificial Sequence
  Description of Artificial Sequence: Synthetic peptide
QQSYYYPST

SEQ ID NO: 2018 - protein, 9 aa, Artificial Sequence
  Description of Artificial Sequence: Synthetic peptide
QQSYYSPST

SEQ ID NO: 2019 - protein, 9 aa, Artificial Sequence
  Description of Artificial Sequence: Synthetic peptide
QQSYYSPYT

SEQ ID NO: 2020 - protein, 9 aa, Artificial Sequence
  Description of Artificial Sequence: Synthetic peptide
  MOD_RES (3)..(6): Variable amino acid
  MOD_RES (8)..(8): Variable amino acid
QQXXXXPXT

SEQ ID NO: 2021 - protein, 9 aa, Artificial Sequence
  Description of Artificial Sequence: Synthetic peptide
QQSYSSPYT

SEQ ID NO: 2022 - protein, 9 aa, Artificial Sequence
  Description of Artificial Sequence: Synthetic peptide
QQSYYYPST

SEQ ID NO: 2023 - protein, 9 aa, Artificial Sequence
  Description of Artificial Sequence: Synthetic peptide
QQSYYSPST

SEQ ID NO: 2024 - protein, 9 aa, Artificial Sequence
  Description of Artificial Sequence: Synthetic peptide
QQYYYYPYT

SEQ ID NO: 2025 - protein, 9 aa, Artificial Sequence
  Description of Artificial Sequence: Synthetic peptide
QQSYYSPYT

SEQ ID NO: 2026 - protein, 9 aa, Artificial Sequence
  Description of Artificial Sequence: Synthetic peptide
QQSYYYPST

SEQ ID NO: 2027 - protein, 10 aa, Artificial Sequence
  Description of Artificial Sequence: Synthetic peptide
GFYIYYYSIH

SEQ ID NO: 2028 - protein, 10 aa, Artificial Sequence
  Description of Artificial Sequence: Synthetic peptide
GFYIYYYSIH

SEQ ID NO: 2029 - protein, 10 aa, Artificial Sequence
  Description of Artificial Sequence: Synthetic peptide
GFYIYYYSIH

SEQ ID NO: 2030 - protein, 10 aa, Artificial Sequence
  Description of Artificial Sequence: Synthetic peptide
GFSIYYYSIH

SEQ ID NO: 2031 - protein, 10 aa, Artificial Sequence
  Description of Artificial Sequence: Synthetic peptide
GFSIYYYSIH

SEQ ID NO: 2032 - protein, 10 aa, Artificial Sequence
  Description of Artificial Sequence: Synthetic peptide
GFYIYSYSIH

SEQ ID NO: 2033 - protein, 10 aa, Artificial Sequence
  Description of Artificial Sequence: Synthetic peptide
GFSIYSYSIH

SEQ ID NO: 2034 - protein, 10 aa, Artificial Sequence
  Description of Artificial Sequence: Synthetic peptide
GFSISYYSIH

SEQ ID NO: 2035 - protein, 10 aa, Artificial Sequence
  Description of Artificial Sequence: Synthetic peptide
GFSIYYYSIH

SEQ ID NO: 2036 - protein, 10 aa, Artificial Sequence
  Description of Artificial Sequence: Synthetic peptide
GFYIYYYSIH

SEQ ID NO: 2037 - protein, 10 aa, Artificial Sequence
  Description of Artificial Sequence: Synthetic peptide
GFSISYYSIH

SEQ ID NO: 2038 - protein, 10 aa, Artificial Sequence
  Description of Artificial Sequence: Synthetic peptide
GFSIYSYSIH

SEQ ID NO: 2039 - protein, 10 aa, Artificial Sequence
  Description of Artificial Sequence: Synthetic peptide
GFSIYYYSIH

SEQ ID NO: 2040 - protein, 10 aa, Artificial Sequence
  Description of Artificial Sequence: Synthetic peptide
GFSIYSYSIH

SEQ ID NO: 2041 - protein, 10 aa, Artificial Sequence
  Description of Artificial Sequence: Synthetic peptide
GFYISYYSIH

SEQ ID NO: 2042 - protein, 10 aa, Artificial Sequence
  Description of Artificial Sequence: Synthetic peptide
GFSIYSYSIH

SEQ ID NO: 2043 - protein, 10 aa, Artificial Sequence
  Description of Artificial Sequence: Synthetic peptide
GFYIYSYSIH

SEQ ID NO: 2044 - protein, 10 aa, Artificial Sequence
  Description of Artificial Sequence: Synthetic peptide
GFYIYSYSIH

SEQ ID NO: 2045 - protein, 10 aa, Artificial Sequence
  Description of Artificial Sequence: Synthetic peptide
GFYIYSYSIH

SEQ ID NO: 2046 - protein, 10 aa, Artificial Sequence
  Description of Artificial Sequence: Synthetic peptide
GFSIYYYSIH

SEQ ID NO: 2047 - protein, 10 aa, Artificial Sequence
  Description of Artificial Sequence: Synthetic peptide
GFYIYSYSIH

SEQ ID NO: 2048 - protein, 10 aa, Artificial Sequence
  Description of Artificial Sequence: Synthetic peptide
GFYIYSYSIH

SEQ ID NO: 2049 - protein, 10 aa, Artificial Sequence
  Description of Artificial Sequence: Synthetic peptide
GFYISYYSIH

SEQ ID NO: 2050 - protein, 10 aa, Artificial Sequence
  Description of Artificial Sequence: Synthetic peptide
GFYIYYYSIH

SEQ ID NO: 2051 - protein, 10 aa, Artificial Sequence
  Description of Artificial Sequence: Synthetic peptide
GFSIYSYSIH

SEQ ID NO: 2052 - protein, 10 aa, Artificial Sequence
  Description of Artificial Sequence: Synthetic peptide
GFSIYYYSIH

SEQ ID NO: 2053 - protein, 10 aa, Artificial Sequence
  Description of Artificial Sequence: Synthetic peptide
GFYISYYSIH

SEQ ID NO: 2054 - protein, 10 aa, Artificial Sequence
  Description of Artificial Sequence: Synthetic peptide
GFYIYSYSIH

SEQ ID NO: 2055 - protein, 10 aa, Artificial Sequence
  Description of Artificial Sequence: Synthetic peptide
GFYIYSYSIH

SEQ ID NO: 2056 - protein, 10 aa, Artificial Sequence
  Description of Artificial Sequence: Synthetic peptide
GFYIYSYSIH

SEQ ID NO: 2057 - protein, 10 aa, Artificial Sequence
  Description of Artificial Sequence: Synthetic peptide
GFYIYYYSIH

SEQ ID NO: 2058 - protein, 17 aa, Artificial Sequence
  Description of Artificial Sequence: Synthetic peptide
SISPYYGYTSYADSVKG

SEQ ID NO: 2059 - protein, 17 aa, Artificial Sequence
  Description of Artificial Sequence: Synthetic peptide
SISPYYGYTSYADSVKG

SEQ ID NO: 2060 - protein, 17 aa, Artificial Sequence
  Description of Artificial Sequence: Synthetic peptide
SISPYYGYTSYADSVKG

SEQ ID NO: 2061 - protein, 17 aa, Artificial Sequence
  Description of Artificial Sequence: Synthetic peptide
SISPYYGYTSYADSVKG

SEQ ID NO: 2062 - protein, 17 aa, Artificial Sequence
  Description of Artificial Sequence: Synthetic peptide
SISPYYGYTSYADSVKG

SEQ ID NO: 2063 - protein, 17 aa, Artificial Sequence
  Description of Artificial Sequence: Synthetic peptide
SISPYYGYTSYADSVKG

SEQ ID NO: 2064 - protein, 17 aa, Artificial Sequence
  Description of Artificial Sequence: Synthetic peptide
SISPYYGYTSYADSVKG

SEQ ID NO: 2065 - protein, 17 aa, Artificial Sequence
  Description of Artificial Sequence: Synthetic peptide
SISPYYGYTSYADSVKG

SEQ ID NO: 2066 - protein, 17 aa, Artificial Sequence
  Description of Artificial Sequence: Synthetic peptide
SISPYYGYTSYADSVKG

SEQ ID NO: 2067 - protein, 17 aa, Artificial Sequence
  Description of Artificial Sequence: Synthetic peptide
SISPYYGYTYYADSVKG

SEQ ID NO: 2068 - protein, 17 aa, Artificial Sequence
  Description of Artificial Sequence: Synthetic peptide
SISPYYGYTSYADSVKG

SEQ ID NO: 2069 - protein, 17 aa, Artificial Sequence
  Description of Artificial Sequence: Synthetic peptide
SISPYYGYTSYADSVKG

SEQ ID NO: 2070 - protein, 17 aa, Artificial Sequence
  Description of Artificial Sequence: Synthetic peptide
SISPYYGYTSYADSVKG

SEQ ID NO: 2071 - protein, 17 aa, Artificial Sequence
  Description of Artificial Sequence: Synthetic peptide
SISPYYGYTYYADSVKG

SEQ ID NO: 2072 - protein, 17 aa, Artificial Sequence
  Description of Artificial Sequence: Synthetic peptide
SISPYYGYTSYADSVKG

SEQ ID NO: 2073 - protein, 17 aa, Artificial Sequence
  Description of Artificial Sequence: Synthetic peptide
SISPYYGYTSYADSVKG

SEQ ID NO: 2074 - protein, 17 aa, Artificial Sequence
  Description of Artificial Sequence: Synthetic peptide
SISPYYGYTSYADSVKG

SEQ ID NO: 2075 - protein, 17 aa, Artificial Sequence
  Description of Artificial Sequence: Synthetic peptide
SISPYYGYTSYADSVKG

SEQ ID NO: 2076 - protein, 17 aa, Artificial Sequence
  Description of Artificial Sequence: Synthetic peptide
SISPYYGYTSYADSVKG

SEQ ID NO: 2077 - protein, 17 aa, Artificial Sequence
  Description of Artificial Sequence: Synthetic peptide
YISPYYGYTSYADSVKG

SEQ ID NO: 2078 - protein, 17 aa, Artificial Sequence
  Description of Artificial Sequence: Synthetic peptide
SISPYYGYTSYADSVKG

SEQ ID NO: 2079 - protein, 17 aa, Artificial Sequence
  Description of Artificial Sequence: Synthetic peptide
SISPYYGSTSYADSVKG

SEQ ID NO: 2080 - protein, 17 aa, Artificial Sequence
  Description of Artificial Sequence: Synthetic peptide
YISPYYGYTYYADSVKG

SEQ ID NO: 2081 - protein, 17 aa, Artificial Sequence
  Description of Artificial Sequence: Synthetic peptide
SISPYYGYTYYADSVKG

SEQ ID NO: 2082 - protein, 17 aa, Artificial Sequence
  Description of Artificial Sequence: Synthetic peptide
YISPYYGYTSYADSVKG

SEQ ID NO: 2083 - protein, 17 aa, Artificial Sequence
  Description of Artificial Sequence: Synthetic peptide
SISPYYGYTYYADSVKG

SEQ ID NO: 2084 - protein, 17 aa, Artificial Sequence
  Description of Artificial Sequence: Synthetic peptide
SISPYYGYTSYADSVKG

SEQ ID NO: 2085 - protein, 17 aa, Artificial Sequence
  Description of Artificial Sequence: Synthetic peptide
SISPYYGYTSYADSVKG

SEQ ID NO: 2086 - protein, 17 aa, Artificial Sequence
  Description of Artificial Sequence: Synthetic peptide
SISPYYGYTSYADSVKG

SEQ ID NO: 2087 - protein, 17 aa, Artificial Sequence
  Description of Artificial Sequence: Synthetic peptide
SISPYYGYTYYADSVKG

SEQ ID NO: 2088 - protein, 17 aa, Artificial Sequence
  Description of Artificial Sequence: Synthetic peptide
SISPYYGYTSYADSVKG

SEQ ID NO: 2089 - protein, 13 aa, Artificial Sequence
  Description of Artificial Sequence: Synthetic peptide
YSYSYYSYSYSGL

SEQ ID NO: 2090 - protein, 13 aa, Artificial Sequence
  Description of Artificial Sequence: Synthetic peptide
YSYSYSSYSYSAM

SEQ ID NO: 2091 - protein, 13 aa, Artificial Sequence
  Description of Artificial Sequence: Synthetic peptide
YSYSYSSYSSSGM

SEQ ID NO: 2092 - protein, 13 aa, Artificial Sequence
  Description of Artificial Sequence: Synthetic peptide
YSYSYSSYSYSGM

SEQ ID NO: 2093 - protein, 14 aa, Artificial Sequence
  Description of Artificial Sequence: Synthetic peptide
YSYSYSSYSYYYGL

SEQ ID NO: 2094 - protein, 14 aa, Artificial Sequence
  Description of Artificial Sequence: Synthetic peptide
YYYSYSYSSYYYGM

SEQ ID NO: 2095 - protein, 14 aa, Artificial Sequence
  Description of Artificial Sequence: Synthetic peptide
SYYSYSSYSSYYGL

SEQ ID NO: 2096 - protein, 14 aa, Artificial Sequence
  Description of Artificial Sequence: Synthetic peptide
YYYSYYSYSSYYGL

SEQ ID NO: 2097 - protein, 14 aa, Artificial Sequence
  Description of Artificial Sequence: Synthetic peptide
SYYSYSSYSSYYGL

SEQ ID NO: 2098 - protein, 14 aa, Artificial Sequence
  Description of Artificial Sequence: Synthetic peptide
YSYSYSSSYYYSGF

SEQ ID NO: 2099 - protein, 14 aa, Artificial Sequence
  Description of Artificial Sequence: Synthetic peptide
YYYSYSSYSYYSGM

SEQ ID NO: 2100 - protein, 14 aa, Artificial Sequence
  Description of Artificial Sequence: Synthetic peptide
YYYSYSSYSSYSAI

SEQ ID NO: 2101 - protein, 14 aa, Artificial Sequence
  Description of Artificial Sequence: Synthetic peptide
YSYSYSSYSSYYGF

SEQ ID NO: 2102 - protein, 14 aa, Artificial Sequence
  Description of Artificial Sequence: Synthetic peptide
YYYSYSYSSYYYGM

SEQ ID NO: 2103 - protein, 14 aa, Artificial Sequence
  Description of Artificial Sequence: Synthetic peptide
YYYSYSYSSSYYGM

SEQ ID NO: 2104 - protein, 14 aa, Artificial Sequence
  Description of Artificial Sequence: Synthetic peptide
YYYSYSSYYSYYGL

SEQ ID NO: 2105 - protein, 14 aa, Artificial Sequence
  Description of Artificial Sequence: Synthetic peptide
SYYSYSSYSYSSGF

SEQ ID NO: 2106 - protein, 14 aa, Artificial Sequence
  Description of Artificial Sequence: Synthetic peptide
YYYSYSSYSYYSGF

SEQ ID NO: 2107 - protein, 14 aa, Artificial Sequence
  Description of Artificial Sequence: Synthetic peptide
SYYSYSSYSYSYGL

SEQ ID NO: 2108 - protein, 14 aa, Artificial Sequence
  Description of Artificial Sequence: Synthetic peptide
YSYSYSSYSYYYAF

SEQ ID NO: 2109 - protein, 14 aa, Artificial Sequence
  Description of Artificial Sequence: Synthetic peptide
YYYSYSSYSSYYGL

SEQ ID NO: 2110 - protein, 14 aa, Artificial Sequence
  Description of Artificial Sequence: Synthetic peptide
YYYSYSSYSSYYGL

SEQ ID NO: 2111 - protein, 14 aa, Artificial Sequence
  Description of Artificial Sequence: Synthetic peptide
SSYSYSSYSSYYGL

SEQ ID NO: 2112 - protein, 14 aa, Artificial Sequence
  Description of Artificial Sequence: Synthetic peptide
YYYSYSSYSSYYGF

SEQ ID NO: 2113 - protein, 15 aa, Artificial Sequence
  Description of Artificial Sequence: Synthetic peptide
YYYSYSYYYSYYYGL

SEQ ID NO: 2114 - protein, 15 aa, Artificial Sequence
  Description of Artificial Sequence: Synthetic peptide
YYYSYSYSSYSYSAM

SEQ ID NO: 2115 - protein, 16 aa, Artificial Sequence
  Description of Artificial Sequence: Synthetic peptide
YYYSYSYSSSSSYSAL

SEQ ID NO: 2116 - protein, 16 aa, Artificial Sequence
  Description of Artificial Sequence: Synthetic peptide
YYYSYYYSSSSSYSAL

SEQ ID NO: 2117 - protein, 16 aa, Artificial Sequence
  Description of Artificial Sequence: Synthetic peptide
YYYSYSSYSYSSSSAM

SEQ ID NO: 2118 - protein, 16 aa, Artificial Sequence
  Description of Artificial Sequence: Synthetic peptide
YYYSYSYSSYSSYSGF

SEQ ID NO: 2119 - protein, 17 aa, Artificial Sequence
  Description of Artificial Sequence: Synthetic peptide
YYYSYSYYSSSSSYYGF

SEQ ID NO: 2120 - protein, 9 aa, Artificial Sequence
  Description of Artificial Sequence: Synthetic peptide
QQSWWWPWT

SEQ ID NO: 2121 - protein, 9 aa, Artificial Sequence
  Description of Artificial Sequence: Synthetic peptide
QQSWWWPST

SEQ ID NO: 2122 - protein, 9 aa, Artificial Sequence
  Description of Artificial Sequence: Synthetic peptide
QQSWWSPST

SEQ ID NO: 2123 - protein, 9 aa, Artificial Sequence
  Description of Artificial Sequence: Synthetic peptide
QQWWWWPWT

SEQ ID NO: 2124 - protein, 9 aa, Artificial Sequence
  Description of Artificial Sequence: Synthetic peptide
QQWWWWPST

SEQ ID NO: 2125 - protein, 9 aa, Artificial Sequence
  Description of Artificial Sequence: Synthetic peptide
QQSWWWPST

SEQ ID NO: 2126 - protein, 9 aa, Artificial Sequence
  Description of Artificial Sequence: Synthetic peptide
QQWWWWPST

SEQ ID NO: 2127 - protein, 9 aa, Artificial Sequence
  Description of Artificial Sequence: Synthetic peptide
QQWWWWPST

SEQ ID NO: 2128 - protein, 9 aa, Artificial Sequence
  Description of Artificial Sequence: Synthetic peptide
QQWWWWPST

SEQ ID NO: 2129 - protein, 9 aa, Artificial Sequence
  Description of Artificial Sequence: Synthetic peptide
QQWSWWPST

SEQ ID NO: 2130 - protein, 9 aa, Artificial Sequence
  Description of Artificial Sequence: Synthetic peptide
QQWSSWPST

SEQ ID NO: 2131 - protein, 9 aa, Artificial Sequence
  Description of Artificial Sequence: Synthetic peptide
QQWSSWPST

SEQ ID NO: 2132 - protein, 9 aa, Artificial Sequence
  Description of Artificial Sequence: Synthetic peptide
QQSSSSPST

SEQ ID NO: 2133 - protein, 9 aa, Artificial Sequence
  Description of Artificial Sequence: Synthetic peptide
QQWSWSPST

SEQ ID NO: 2134 - protein, 9 aa, Artificial Sequence
  Description of Artificial Sequence: Synthetic peptide
QQWSSWPST

SEQ ID NO: 2135 - protein, 9 aa, Artificial Sequence
  Description of Artificial Sequence: Synthetic peptide
QQWSSWPST

SEQ ID NO: 2136 - protein, 9 aa, Artificial Sequence
  Description of Artificial Sequence: Synthetic peptide
QQSYYSPST

SEQ ID NO: 2137 - protein, 9 aa, Artificial Sequence
  Description of Artificial Sequence: Synthetic peptide
QQYYYSPST

SEQ ID NO: 2138 - protein, 9 aa, Artificial Sequence
  Description of Artificial Sequence: Synthetic peptide
QQSYYYPST

SEQ ID NO: 2139 - protein, 9 aa, Artificial Sequence
  Description of Artificial Sequence: Synthetic peptide
QQSYYYPST

SEQ ID NO: 2140 - protein, 9 aa, Artificial Sequence
  Description of Artificial Sequence: Synthetic peptide
QQSYYYPST

SEQ ID NO: 2141 - protein, 9 aa, Artificial Sequence
  Description of Artificial Sequence: Synthetic peptide
QQSYYYPST

SEQ ID NO: 2142 - protein, 9 aa, Artificial Sequence
  Description of Artificial Sequence: Synthetic peptide
QQSYYSPST

SEQ ID NO: 2143 - protein, 9 aa, Artificial Sequence
  Description of Artificial Sequence: Synthetic peptide
QQSSSSPST

SEQ ID NO: 2144 - protein, 9 aa, Artificial Sequence
  Description of Artificial Sequence: Synthetic peptide
QQSYSYPYT

SEQ ID NO: 2145 - protein, 9 aa, Artificial Sequence
  Description of Artificial Sequence: Synthetic peptide
QQYYSSPYT

SEQ ID NO: 2146 - protein, 9 aa, Artificial Sequence
  Description of Artificial Sequence: Synthetic peptide
QQYYSSPYT

SEQ ID NO: 2147 - protein, 10 aa, Artificial Sequence
  Description of Artificial Sequence: Synthetic peptide
GFSIWWSWIH

SEQ ID NO: 2148 - protein, 10 aa, Artificial Sequence
  Description of Artificial Sequence: Synthetic peptide
GFSIWWSWIH

SEQ ID NO: 2149 - protein, 10 aa, Artificial Sequence
  Description of Artificial Sequence: Synthetic peptide
GFSIWWSWIH

SEQ ID NO: 2150 - protein, 10 aa, Artificial Sequence
  Description of Artificial Sequence: Synthetic peptide
GFSIWWSWIH

SEQ ID NO: 2151 - protein, 10 aa, Artificial Sequence
  Description of Artificial Sequence: Synthetic peptide
GFSIWSSWIH

SEQ ID NO: 2152 - protein, 10 aa, Artificial Sequence
  Description of Artificial Sequence: Synthetic peptide
GFSIWWSWIH

SEQ ID NO: 2153 - protein, 10 aa, Artificial Sequence
  Description of Artificial Sequence: Synthetic peptide
GFSISWSWIH

SEQ ID NO: 2154 - protein, 10 aa, Artificial Sequence
  Description of Artificial Sequence: Synthetic peptide
GFSIWWSWIH

SEQ ID NO: 2155 - protein, 10 aa, Artificial Sequence
  Description of Artificial Sequence: Synthetic peptide
GFSIWWSWIH

SEQ ID NO: 2156 - protein, 10 aa, Artificial Sequence
  Description of Artificial Sequence: Synthetic peptide
GFSIWWSWIH

SEQ ID NO: 2157 - protein, 10 aa, Artificial Sequence
  Description of Artificial Sequence: Synthetic peptide
GFWIWSSSIH

SEQ ID NO: 2158 - protein, 10 aa, Artificial Sequence
  Description of Artificial Sequence: Synthetic peptide
GFWIWSSSIH

SEQ ID NO: 2159 - protein, 10 aa, Artificial Sequence
  Description of Artificial Sequence: Synthetic peptide
GFSISSSWIH

SEQ ID NO: 2160 - protein, 10 aa, Artificial Sequence
  Description of Artificial Sequence: Synthetic peptide
GFSISSSSIH

SEQ ID NO: 2161 - protein, 10 aa, Artificial Sequence
  Description of Artificial Sequence: Synthetic peptide
GFWIWSSSIH

SEQ ID NO: 2162 - protein, 10 aa, Artificial Sequence
  Description of Artificial Sequence: Synthetic peptide
GFSIWSSSIH

SEQ ID NO: 2163 - protein, 10 aa, Artificial Sequence
  Description of Artificial Sequence: Synthetic peptide
GFSIYSYYIH

SEQ ID NO: 2164 - protein, 10 aa, Artificial Sequence
  Description of Artificial Sequence: Synthetic peptide
GFYISYSYIH

SEQ ID NO: 2165 - protein, 10 aa, Artificial Sequence
  Description of Artificial Sequence: Synthetic peptide
GFYISSSYIH

SEQ ID NO: 2166 - protein, 10 aa, Artificial Sequence
  Description of Artificial Sequence: Synthetic peptide
GFSISSSYIH

SEQ ID NO: 2167 - protein, 10 aa, Artificial Sequence
  Description of Artificial Sequence: Synthetic peptide
GFSISSSYIH

SEQ ID NO: 2168 - protein, 10 aa, Artificial Sequence
  Description of Artificial Sequence: Synthetic peptide
GFSIYSSYIH

SEQ ID NO: 2169 - protein, 10 aa, Artificial Sequence
  Description of Artificial Sequence: Synthetic peptide
GFYISSSYIH

SEQ ID NO: 2170 - protein, 10 aa, Artificial Sequence
  Description of Artificial Sequence: Synthetic peptide
GFYISYSSIH

SEQ ID NO: 2171 - protein, 10 aa, Artificial Sequence
  Description of Artificial Sequence: Synthetic peptide
GFYISSSSIH

SEQ ID NO: 2172 - protein, 10 aa, Artificial Sequence
  Description of Artificial Sequence: Synthetic peptide
GFSIYYSSIH

SEQ ID NO: 2173 - protein, 10 aa, Artificial Sequence
  Description of Artificial Sequence: Synthetic peptide
GFSIYYSSIH

SEQ ID NO: 2174 - protein, 17 aa, Artificial Sequence
  Description of Artificial Sequence: Synthetic peptide
SISPSSGWTSYADSVKG

SEQ ID NO: 2175 - protein, 17 aa, Artificial Sequence
  Description of Artificial Sequence: Synthetic peptide
SISPSSGWTSYADSVKG

SEQ ID NO: 2176 - protein, 17 aa, Artificial Sequence
  Description of Artificial Sequence: Synthetic peptide
SIYPSSGYTSYADSVKG

SEQ ID NO: 2177 - protein, 17 aa, Artificial Sequence
  Description of Artificial Sequence: Synthetic peptide
SISPSSGWTSYADSVKG

SEQ ID NO: 2178 - protein, 17 aa, Artificial Sequence
  Description of Artificial Sequence: Synthetic peptide
SISPSSGWTSYADSVKG

SEQ ID NO: 2179 - protein, 17 aa, Artificial Sequence
  Description of Artificial Sequence: Synthetic peptide
SISPSSGWTSYADSVKG

SEQ ID NO: 2180 - protein, 17 aa, Artificial Sequence
  Description of Artificial Sequence: Synthetic peptide
SIWPSSGWTSYADSVKG

SEQ ID NO: 2181 - protein, 17 aa, Artificial Sequence
  Description of Artificial Sequence: Synthetic peptide
SISPSSGWTSYADSVKG

SEQ ID NO: 2182 - protein, 17 aa, Artificial Sequence
  Description of Artificial Sequence: Synthetic peptide
SISPSSGWTSYADSVKG

SEQ ID NO: 2183 - protein, 17 aa, Artificial Sequence
  Description of Artificial Sequence: Synthetic peptide
SISPSSGWTSYADSVKG

SEQ ID NO: 2184 - protein, 17 aa, Artificial Sequence
  Description of Artificial Sequence: Synthetic peptide
WISPSSGSTWYADSVKG

SEQ ID NO: 2185 - protein, 17 aa, Artificial Sequence
  Description of Artificial Sequence: Synthetic peptide
WISPSSGSTWYADSVKG

SEQ ID NO: 2186 - protein, 17 aa, Artificial Sequence
  Description of Artificial Sequence: Synthetic peptide
WIWPSSGWTSYADSVKG

SEQ ID NO: 2187 - protein, 17 aa, Artificial Sequence
  Description of Artificial Sequence: Synthetic peptide
WISPSWGSTWYADSVKG

SEQ ID NO: 2188 - protein, 17 aa, Artificial Sequence
  Description of Artificial Sequence: Synthetic peptide
WISPSSGSTWYADSVKG

SEQ ID NO: 2189 - protein, 17 aa, Artificial Sequence
  Description of Artificial Sequence: Synthetic peptide
WISPSSGSTWYADSVKG

SEQ ID NO: 2190 - protein, 17 aa, Artificial Sequence
  Description of Artificial Sequence: Synthetic peptide
SIYPSSGYTSYADSVKG

SEQ ID NO: 2191 - protein, 17 aa, Artificial Sequence
  Description of Artificial Sequence: Synthetic peptide
SIYPYSGYTSYADSVKG

SEQ ID NO: 2192 - protein, 17 aa, Artificial Sequence
  Description of Artificial Sequence: Synthetic peptide
SIYPYSGYTSYADSVKG

SEQ ID NO: 2193 - protein, 17 aa, Artificial Sequence
  Description of Artificial Sequence: Synthetic peptide
SIYPYSGYTSYADSVKG

SEQ ID NO: 2194 - protein, 17 aa, Artificial Sequence
  Description of Artificial Sequence: Synthetic peptide
SIYPYSGYTSYADSVKG

SEQ ID NO: 2195 - protein, 17 aa, Artificial Sequence
  Description of Artificial Sequence: Synthetic peptide
SIYPYSGYTSYADSVKG

SEQ ID NO: 2196 - protein, 17 aa, Artificial Sequence
  Description of Artificial Sequence: Synthetic peptide
SIYPYSGYTSYADSVKG

SEQ ID NO: 2197 - protein, 17 aa, Artificial Sequence
  Description of Artificial Sequence: Synthetic peptide
SISPYSGYTYYADSVKG

SEQ ID NO: 2198 - protein, 17 aa, Artificial Sequence
  Description of Artificial Sequence: Synthetic peptide
YISPSSGYTYYADSVKG

SEQ ID NO: 2199 - protein, 17 aa, Artificial Sequence
  Description of Artificial Sequence: Synthetic peptide
SIYPYSGSTYYADSVKG

SEQ ID NO: 2200 - protein, 17 aa, Artificial Sequence
  Description of Artificial Sequence: Synthetic peptide
SIYPSSGSTYYADSVKG

SEQ ID NO: 2201 - protein, 6 aa, Artificial Sequence
  Description of Artificial Sequence: Synthetic peptide
WWSSAI

SEQ ID NO: 2202 - protein, 6 aa, Artificial Sequence
  Description of Artificial Sequence: Synthetic peptide
WWSSAL

SEQ ID NO: 2203 - protein, 6 aa, Artificial Sequence
  Description of Artificial Sequence: Synthetic peptide
WWSSAL

SEQ ID NO: 2204 - protein, 6 aa, Artificial Sequence
  Description of Artificial Sequence: Synthetic peptide
WWSSGM

SEQ ID NO: 2205 - protein, 6 aa, Artificial Sequence
  Description of Artificial Sequence: Synthetic peptide
WWSSAL

SEQ ID NO: 2206 - protein, 6 aa, Artificial Sequence
  Description of Artificial Sequence: Synthetic peptide
WWSSAF

SEQ ID NO: 2207 - protein, 6 aa, Artificial Sequence
  Description of Artificial Sequence: Synthetic peptide
WWSSAL

SEQ ID NO: 2208 - protein, 6 aa, Artificial Sequence
  Description of Artificial Sequence: Synthetic peptide
WSSSAF

SEQ ID NO: 2209 - protein, 6 aa, Artificial Sequence
  Description of Artificial Sequence: Synthetic peptide
WWSSAM

SEQ ID NO: 2210 - protein, 6 aa, Artificial Sequence
  Description of Artificial Sequence: Synthetic peptide
WSSWGL

SEQ ID NO: 2211 - protein, 10 aa, Artificial Sequence
  Description of Artificial Sequence: Synthetic peptide
SSWSSWSSAL

SEQ ID NO: 2212 - protein, 10 aa, Artificial Sequence
  Description of Artificial Sequence: Synthetic peptide
SSWSSWSSAL

SEQ ID NO: 2213 - protein, 10 aa, Artificial Sequence
  Description of Artificial Sequence: Synthetic peptide
SSSSSWWSAI

SEQ ID NO: 2214 - protein, 10 aa, Artificial Sequence
  Description of Artificial Sequence: Synthetic peptide
SSWSSWSWAL

SEQ ID NO: 2215 - protein, 10 aa, Artificial Sequence
  Description of Artificial Sequence: Synthetic peptide
SSWSSWSSAM

SEQ ID NO: 2216 - protein, 10 aa, Artificial Sequence
  Description of Artificial Sequence: Synthetic peptide
SSWSSWSSAM

SEQ ID NO: 2217 - protein, 6 aa, Artificial Sequence
  Description of Artificial Sequence: Synthetic peptide
YYSYAL

SEQ ID NO: 2218 - protein, 6 aa, Artificial Sequence
  Description of Artificial Sequence: Synthetic peptide
YYSYAF

SEQ ID NO: 2219 - protein, 6 aa, Artificial Sequence
  Description of Artificial Sequence: Synthetic peptide
YYSYAF

SEQ ID NO: 2220 - protein, 6 aa, Artificial Sequence
  Description of Artificial Sequence: Synthetic peptide
YYSSAF

SEQ ID NO: 2221 - protein, 6 aa, Artificial Sequence
  Description of Artificial Sequence: Synthetic peptide
YYSYAL

SEQ ID NO: 2222 - protein, 6 aa, Artificial Sequence
  Description of Artificial Sequence: Synthetic peptide
YYSYAF

SEQ ID NO: 2223 - protein, 6 aa, Artificial Sequence
  Description of Artificial Sequence: Synthetic peptide
YYSYAL

SEQ ID NO: 2224 - protein, 12 aa, Artificial Sequence
  Description of Artificial Sequence: Synthetic peptide
SSYSYYYYSYAL

SEQ ID NO: 2225 - protein, 13 aa, Artificial Sequence
  Description of Artificial Sequence: Synthetic peptide
YYSSYYSYYSYAL

SEQ ID NO: 2226 - protein, 16 aa, Artificial Sequence
  Description of Artificial Sequence: Synthetic peptide
YYSSYSSSSSYYYYAF

SEQ ID NO: 2227 - protein, 17 aa, Artificial Sequence
  Description of Artificial Sequence: Synthetic peptide
YYSSSSSYSSSYYYYAF

SEQ ID NO: 2228 - protein, 9 aa, Artificial Sequence
  Description of Artificial Sequence: Synthetic peptide
QQWWSSPST

SEQ ID NO: 2229 - protein, 9 aa, Artificial Sequence
  Description of Artificial Sequence: Synthetic peptide
QQWWSSPST

SEQ ID NO: 2230 - protein, 9 aa, Artificial Sequence
  Description of Artificial Sequence: Synthetic peptide
QQSWSWPST

SEQ ID NO: 2231 - protein, 9 aa, Artificial Sequence
  Description of Artificial Sequence: Synthetic peptide
QQSSWSPST

SEQ ID NO: 2232 - protein, 9 aa, Artificial Sequence
  Description of Artificial Sequence: Synthetic peptide
QQRSRRPRT

SEQ ID NO: 2233 - protein, 9 aa, Artificial Sequence
  Description of Artificial Sequence: Synthetic peptide
QQRSRSPRT

SEQ ID NO: 2234 - protein, 9 aa, Artificial Sequence
  Description of Artificial Sequence: Synthetic peptide
QQRSSRPRT

SEQ ID NO: 2235 - protein, 9 aa, Artificial Sequence
  Description of Artificial Sequence: Synthetic peptide
QQRSRSPRT

SEQ ID NO: 2236 - protein, 9 aa, Artificial Sequence
  Description of Artificial Sequence: Synthetic peptide
QQRSSSPRT

SEQ ID NO: 2237 - protein, 9 aa, Artificial Sequence
  Description of Artificial Sequence: Synthetic peptide
QQSSRSPRT

SEQ ID NO: 2238 - protein, 9 aa, Artificial Sequence
  Description of Artificial Sequence: Synthetic peptide
QQYYYSPYT

SEQ ID NO: 2239 - protein, 10 aa, Artificial Sequence
  Description of Artificial Sequence: Synthetic peptide
GFWISWSWIH

SEQ ID NO: 2240 - protein, 10 aa, Artificial Sequence
  Description of Artificial Sequence: Synthetic peptide
GFWIWSSWIH

SEQ ID NO: 2241 - protein, 10 aa, Artificial Sequence
  Description of Artificial Sequence: Synthetic peptide
GFSISWSSIH

SEQ ID NO: 2242 - protein, 10 aa, Artificial Sequence
  Description of Artificial Sequence: Synthetic peptide
GFWISWSSIH

SEQ ID NO: 2243 - protein, 10 aa, Artificial Sequence
  Description of Artificial Sequence: Synthetic peptide
GFRISRSSIH

SEQ ID NO: 2244 - protein, 10 aa, Artificial Sequence
  Description of Artificial Sequence: Synthetic peptide
GFRISSSSIH

SEQ ID NO: 2245 - protein, 10 aa, Artificial Sequence
  Description of Artificial Sequence: Synthetic peptide
GFRISRSSIH

SEQ ID NO: 2246 - protein, 10 aa, Artificial Sequence
  Description of Artificial Sequence: Synthetic peptide
GFSIRRSSIH

SEQ ID NO: 2247 - protein, 10 aa, Artificial Sequence
  Description of Artificial Sequence: Synthetic peptide
GFSIRRSSIH

SEQ ID NO: 2248 - protein, 10 aa, Artificial Sequence
  Description of Artificial Sequence: Synthetic peptide
GFSISRSSIH

SEQ ID NO: 2249 - protein, 10 aa, Artificial Sequence
  Description of Artificial Sequence: Synthetic peptide
GFYIYYYSIH

SEQ ID NO: 2250 - protein, 17 aa, Artificial Sequence
  Description of Artificial Sequence: Synthetic peptide
SISPWSGSTSYADSVKG

SEQ ID NO: 2251 - protein, 17 aa, Artificial Sequence
  Description of Artificial Sequence: Synthetic peptide
SISPWSGSTSYADSVKG

SEQ ID NO: 2252 - protein, 17 aa, Artificial Sequence
  Description of Artificial Sequence: Synthetic peptide
SISPSSGWTWYADSVKG

SEQ ID NO: 2253 - protein, 17 aa, Artificial Sequence
  Description of Artificial Sequence: Synthetic peptide
SISPSSGWTSYADSVKG

SEQ ID NO: 2254 - protein, 17 aa, Artificial Sequence
  Description of Artificial Sequence: Synthetic peptide
SISPSSGRTSYADSVKG

SEQ ID NO: 2255 - protein, 17 aa, Artificial Sequence
  Description of Artificial Sequence: Synthetic peptide
SIRPSRGRTSYADSVKG

SEQ ID NO: 2256 - protein, 17 aa, Artificial Sequence
  Description of Artificial Sequence: Synthetic peptide
SIRPRSGRTSYADSVKG

SEQ ID NO: 2257 - protein, 17 aa, Artificial Sequence
  Description of Artificial Sequence: Synthetic peptide
SISPRSGSTSYADSVKG

SEQ ID NO: 2258 - protein, 17 aa, Artificial Sequence
  Description of Artificial Sequence: Synthetic peptide
SIRPSRGRTSYADSVKG

SEQ ID NO: 2259 - protein, 17 aa, Artificial Sequence
  Description of Artificial Sequence: Synthetic peptide
SIRPRRGSTSYADSVKG

SEQ ID NO: 2260 - protein, 17 aa, Artificial Sequence
  Description of Artificial Sequence: Synthetic peptide
SISPYYGSTYYADSVKG

SEQ ID NO: 2261 - protein, 7 aa, Artificial Sequence
  Description of Artificial Sequence: Synthetic peptide
SSWWWAM

SEQ ID NO: 2262 - protein, 7 aa, Artificial Sequence
  Description of Artificial Sequence: Synthetic peptide
SSWWWAF

SEQ ID NO: 2263 - protein, 8 aa, Artificial Sequence
  Description of Artificial Sequence: Synthetic peptide
SWSWWSAL

SEQ ID NO: 2264 - protein, 8 aa, Artificial Sequence
  Description of Artificial Sequence: Synthetic peptide
SWSWWSAM

SEQ ID NO: 2265 - protein, 8 aa, Artificial Sequence
  Description of Artificial Sequence: Synthetic peptide
SRSSRSGF

SEQ ID NO: 2266 - protein, 8 aa, Artificial Sequence
  Description of Artificial Sequence: Synthetic peptide
SRRSSSGF

SEQ ID NO: 2267 - protein, 8 aa, Artificial Sequence
  Description of Artificial Sequence: Synthetic peptide
SRRSSSGL

SEQ ID NO: 2268 - protein, 8 aa, Artificial Sequence
  Description of Artificial Sequence: Synthetic peptide
SRRRSSGF

SEQ ID NO: 2269 - protein, 8 aa, Artificial Sequence
  Description of Artificial Sequence: Synthetic peptide
SRRSSSGF

SEQ ID NO: 2270 - protein, 8 aa, Artificial Sequence
  Description of Artificial Sequence: Synthetic peptide
SRRRSSAF

SEQ ID NO: 2271 - protein, 14 aa, Artificial Sequence
  Description of Artificial Sequence: Synthetic peptide
SYSYSYSYSSSYAI

SEQ ID NO: 2272 - protein, 9 aa, Artificial Sequence
  Description of Artificial Sequence: Synthetic peptide
QQFFFSPST

SEQ ID NO: 2273 - protein, 9 aa, Artificial Sequence
  Description of Artificial Sequence: Synthetic peptide
QQSSSSPST

SEQ ID NO: 2274 - protein, 9 aa, Artificial Sequence
  Description of Artificial Sequence: Synthetic peptide
QQWSSSPST

SEQ ID NO: 2275 - protein, 9 aa, Artificial Sequence
  Description of Artificial Sequence: Synthetic peptide
QQWSSSPST

SEQ ID NO: 2276 - protein, 9 aa, Artificial Sequence
  Description of Artificial Sequence: Synthetic peptide
QQWSWSPWT

SEQ ID NO: 2277 - protein, 9 aa, Artificial Sequence
  Description of Artificial Sequence: Synthetic peptide
QQWWSSPWT

SEQ ID NO: 2278 - protein, 9 aa, Artificial Sequence
  Description of Artificial Sequence: Synthetic peptide
QQYYSYPST

SEQ ID NO: 2279 - protein, 9 aa, Artificial Sequence
  Description of Artificial Sequence: Synthetic peptide
QQYYSSPYT

SEQ ID NO: 2280 - protein, 9 aa, Artificial Sequence
  Description of Artificial Sequence: Synthetic peptide
QQYYSYPYT

SEQ ID NO: 2281 - protein, 9 aa, Artificial Sequence
  Description of Artificial Sequence: Synthetic peptide
QQYYSYPYT

SEQ ID NO: 2282 - protein, 9 aa, Artificial Sequence
  Description of Artificial Sequence: Synthetic peptide
QQYYSYPYT

SEQ ID NO: 2283 - protein, 9 aa, Artificial Sequence
  Description of Artificial Sequence: Synthetic peptide
QQSSYSPYT

SEQ ID NO: 2284 - protein, 9 aa, Artificial Sequence
  Description of Artificial Sequence: Synthetic peptide
QQSSYSPST

SEQ ID NO: 2285 - protein, 9 aa, Artificial Sequence
  Description of Artificial Sequence: Synthetic peptide
QQYYSSPST

SEQ ID NO: 2286 - protein, 9 aa, Artificial Sequence
  Description of Artificial Sequence: Synthetic peptide
QQYYYSPYT

SEQ ID NO: 2287 - protein, 9 aa, Artificial Sequence
  Description of Artificial Sequence: Synthetic peptide
QQYYYYPST

SEQ ID NO: 2288 - protein, 9 aa, Artificial Sequence
  Description of Artificial Sequence: Synthetic peptide
QQYYYYPYT

SEQ ID NO: 2289 - protein, 9 aa, Artificial Sequence
  Description of Artificial Sequence: Synthetic peptide
QQYYYYPYT

SEQ ID NO: 2290 - protein, 9 aa, Artificial Sequence
  Description of Artificial Sequence: Synthetic peptide
QQYYYYPYT

SEQ ID NO: 2291 - protein, 9 aa, Artificial Sequence
  Description of Artificial Sequence: Synthetic peptide
QQYYSYPYT

SEQ ID NO: 2292 - protein, 9 aa, Artificial Sequence
  Description of Artificial Sequence: Synthetic peptide
QQYSSYPYT

SEQ ID NO: 2293 - protein, 9 aa, Artificial Sequence
  Description of Artificial Sequence: Synthetic peptide
QQYSSYPYT

SEQ ID NO: 2294 - protein, 9 aa, Artificial Sequence
  Description of Artificial Sequence: Synthetic peptide
QQYSSYPYT

SEQ ID NO: 2295 - protein, 9 aa, Artificial Sequence
  Description of Artificial Sequence: Synthetic peptide
QQYSSYPYT

SEQ ID NO: 2296 - protein, 9 aa, Artificial Sequence
  Description of Artificial Sequence: Synthetic peptide
QQYYYYPYT

SEQ ID NO: 2297 - protein, 9 aa, Artificial Sequence
  Description of Artificial Sequence: Synthetic peptide
QQSSYSPYT

SEQ ID NO: 2298 - protein, 9 aa, Artificial Sequence
  Description of Artificial Sequence: Synthetic peptide
QQYYYYPYT

SEQ ID NO: 2299 - protein, 9 aa, Artificial Sequence
  Description of Artificial Sequence: Synthetic peptide
QQYYYSPYT

SEQ ID NO: 2300 - protein, 10 aa, Artificial Sequence
  Description of Artificial Sequence: Synthetic peptide
GFSISFFSIH

SEQ ID NO: 2301 - protein, 10 aa, Artificial Sequence
  Description of Artificial Sequence: Synthetic peptide
GFSISSSWIH

SEQ ID NO: 2302 - protein, 10 aa, Artificial Sequence
  Description of Artificial Sequence: Synthetic peptide
GFWISSSWIH

SEQ ID NO: 2303 - protein, 10 aa, Artificial Sequence
  Description of Artificial Sequence: Synthetic peptide
GFSISSSWIH

SEQ ID NO: 2304 - protein, 10 aa, Artificial Sequence
  Description of Artificial Sequence: Synthetic peptide
GFSISWSWIH

SEQ ID NO: 2305 - protein, 10 aa, Artificial Sequence
  Description of Artificial Sequence: Synthetic peptide
GFWISWSSIH

SEQ ID NO: 2306 - protein, 10 aa, Artificial Sequence
  Description of Artificial Sequence: Synthetic peptide
GFYISYYYIH

SEQ ID NO: 2307 - protein, 10 aa, Artificial Sequence
  Description of Artificial Sequence: Synthetic peptide
GFYISYYYIH

SEQ ID NO: 2308 - protein, 10 aa, Artificial Sequence
  Description of Artificial Sequence: Synthetic peptide
GFYISYYSIH

SEQ ID NO: 2309 - protein, 10 aa, Artificial Sequence
  Description of Artificial Sequence: Synthetic peptide
GFYISYYYIH

SEQ ID NO: 2310 - protein, 10 aa, Artificial Sequence
  Description of Artificial Sequence: Synthetic peptide
GFYISYYSIH

SEQ ID NO: 2311 - protein, 10 aa, Artificial Sequence
  Description of Artificial Sequence: Synthetic peptide
GFSISYYYIH

SEQ ID NO: 2312 - protein, 10 aa, Artificial Sequence
  Description of Artificial Sequence: Synthetic peptide
GFYIYYSSIH

SEQ ID NO: 2313 - protein, 10 aa, Artificial Sequence
  Description of Artificial Sequence: Synthetic peptide
GFYISYYYIH

SEQ ID NO: 2314 - protein, 10 aa, Artificial Sequence
  Description of Artificial Sequence: Synthetic peptide
GFSIYSSYIH

SEQ ID NO: 2315 - protein, 10 aa, Artificial Sequence
  Description of Artificial Sequence: Synthetic peptide
GFSISYSYIH

SEQ ID NO: 2316 - protein, 10 aa, Artificial Sequence
  Description of Artificial Sequence: Synthetic peptide
GFSIYYSYIH

SEQ ID NO: 2317 - protein, 10 aa, Artificial Sequence
  Description of Artificial Sequence: Synthetic peptide
GFSIYSSYIH

SEQ ID NO: 2318 - protein, 10 aa, Artificial Sequence
  Description of Artificial Sequence: Synthetic peptide
GFSIYYSYIH

SEQ ID NO: 2319 - protein, 10 aa, Artificial Sequence
  Description of Artificial Sequence: Synthetic peptide
GFYISYSYIH

SEQ ID NO: 2320 - protein, 10 aa, Artificial Sequence
  Description of Artificial Sequence: Synthetic peptide
GFSIYYSYIH

SEQ ID NO: 2321 - protein, 10 aa, Artificial Sequence
  Description of Artificial Sequence: Synthetic peptide
GFYISYYYIH

SEQ ID NO: 2322 - protein, 10 aa, Artificial Sequence
  Description of Artificial Sequence: Synthetic peptide
GFYISYSYIH

SEQ ID NO: 2323 - protein, 10 aa, Artificial Sequence
  Description of Artificial Sequence: Synthetic peptide
GFYISYSYIH

SEQ ID NO: 2324 - protein, 10 aa, Artificial Sequence
  Description of Artificial Sequence: Synthetic peptide
GFSISSSSIH

SEQ ID NO: 2325 - protein, 10 aa, Artificial Sequence
  Description of Artificial Sequence: Synthetic peptide
GFYISYSYIH

SEQ ID NO: 2326 - protein, 10 aa, Artificial Sequence
  Description of Artificial Sequence: Synthetic peptide
GFSISYSYIH

SEQ ID NO: 2327 - protein, 10 aa, Artificial Sequence
  Description of Artificial Sequence: Synthetic peptide
GFYIYYSYIH

SEQ ID NO: 2328 - protein, 17 aa, Artificial Sequence
  Description of Artificial Sequence: Synthetic peptide
SIFPFSGSTSYADSVKG

SEQ ID NO: 2329 - protein, 17 aa, Artificial Sequence
  Description of Artificial Sequence: Synthetic peptide
WISPSWGWTSYADSVKG

SEQ ID NO: 2330 - protein, 17 aa, Artificial Sequence
  Description of Artificial Sequence: Synthetic peptide
WISPSWGWTSYADSVKG

SEQ ID NO: 2331 - protein, 17 aa, Artificial Sequence
  Description of Artificial Sequence: Synthetic peptide
WISPSWGWTSYADSVKG

SEQ ID NO: 2332 - protein, 17 aa, Artificial Sequence
  Description of Artificial Sequence: Synthetic peptide
SISPSSGWTSYADSVKG

SEQ ID NO: 2333 - protein, 17 aa, Artificial Sequence
  Description of Artificial Sequence: Synthetic peptide
WISPWSGSTSYADSVKG

SEQ ID NO: 2334 - protein, 17 aa, Artificial Sequence
  Description of Artificial Sequence: Synthetic peptide
SISPYSGYTSYADSVKG

SEQ ID NO: 2335 - protein, 17 aa, Artificial Sequence
  Description of Artificial Sequence: Synthetic peptide
SISPYSGYTSYADSVKG

SEQ ID NO: 2336 - protein, 17 aa, Artificial Sequence
  Description of Artificial Sequence: Synthetic peptide
SISPYSGYTSYADSVKG

SEQ ID NO: 2337 - protein, 17 aa, Artificial Sequence
  Description of Artificial Sequence: Synthetic peptide
SISPYSGSTSYADSVKG

SEQ ID NO: 2338 - protein, 17 aa, Artificial Sequence
  Description of Artificial Sequence: Synthetic peptide
YISPYSGYTYYADSVKG

SEQ ID NO: 2339 - protein, 17 aa, Artificial Sequence
  Description of Artificial Sequence: Synthetic peptide
SISPYSGSTSYADSVKG

SEQ ID NO: 2340 - protein, 17 aa, Artificial Sequence
  Description of Artificial Sequence: Synthetic peptide
YISPSSGYTSYADSVKG

SEQ ID NO: 2341 - protein, 17 aa, Artificial Sequence
  Description of Artificial Sequence: Synthetic peptide
YISPYSGYTYYADSVKG

SEQ ID NO: 2342 - protein, 17 aa, Artificial Sequence
  Description of Artificial Sequence: Synthetic peptide
SIYPYSGSTSYADSVKG

SEQ ID NO: 2343 - protein, 17 aa, Artificial Sequence
  Description of Artificial Sequence: Synthetic peptide
YISPYSGSTSYADSVKG

SEQ ID NO: 2344 - protein, 17 aa, Artificial Sequence
  Description of Artificial Sequence: Synthetic peptide
YISPYSGSTSYADSVKG

SEQ ID NO: 2345 - protein, 17 aa, Artificial Sequence
  Description of Artificial Sequence: Synthetic peptide
YISPSSGSTSYADSVKG

SEQ ID NO: 2346 - protein, 17 aa, Artificial Sequence
  Description of Artificial Sequence: Synthetic peptide
YISPYSGYTYYADSVKG

SEQ ID NO: 2347 - protein, 17 aa, Artificial Sequence
  Description of Artificial Sequence: Synthetic peptide
SISPYSGYTSYADSVKG

SEQ ID NO: 2348 - protein, 17 aa, Artificial Sequence
  Description of Artificial Sequence: Synthetic peptide
SISPSSGYTSYADSVKG

SEQ ID NO: 2349 - protein, 17 aa, Artificial Sequence
  Description of Artificial Sequence: Synthetic peptide
SISPSSGYTSYADSVKG

SEQ ID NO: 2350 - protein, 17 aa, Artificial Sequence
  Description of Artificial Sequence: Synthetic peptide
SISPSSGYTSYADSVKG

SEQ ID NO: 2351 - protein, 17 aa, Artificial Sequence
  Description of Artificial Sequence: Synthetic peptide
SISPSSGYTSYADSVKG

SEQ ID NO: 2352 - protein, 17 aa, Artificial Sequence
  Description of Artificial Sequence: Synthetic peptide
SISPSYGYTYYADSVKG

SEQ ID NO: 2353 - protein, 17 aa, Artificial Sequence
  Description of Artificial Sequence: Synthetic peptide
YISPYSGSTSYADSVKG

SEQ ID NO: 2354 - protein, 17 aa, Artificial Sequence
  Description of Artificial Sequence: Synthetic peptide
SISPYSGSTSYADSVKG

SEQ ID NO: 2355 - protein, 17 aa, Artificial Sequence
  Description of Artificial Sequence: Synthetic peptide
SISPYSGSTSYADSVKG

SEQ ID NO: 2356 - protein, 8 aa, Artificial Sequence
  Description of Artificial Sequence: Synthetic peptide
SSFFSSAM

SEQ ID NO: 2357 - protein, 7 aa, Artificial Sequence
  Description of Artificial Sequence: Synthetic peptide
SWWWSAL

SEQ ID NO: 2358 - protein, 7 aa, Artificial Sequence
  Description of Artificial Sequence: Synthetic peptide
SWWWSAF

SEQ ID NO: 2359 - protein, 7 aa, Artificial Sequence
  Description of Artificial Sequence: Synthetic peptide
SWWWSAL

SEQ ID NO: 2360 - protein, 12 aa, Artificial Sequence
  Description of Artificial Sequence: Synthetic peptide
SSSSWWSWSSGL

SEQ ID NO: 2361 - protein, 13 aa, Artificial Sequence
  Description of Artificial Sequence: Synthetic peptide
SSWSSSWSWWWAM

SEQ ID NO: 2362 - protein, 7 aa, Artificial Sequence
  Description of Artificial Sequence: Synthetic peptide
SYSYSGM

SEQ ID NO: 2363 - protein, 7 aa, Artificial Sequence
  Description of Artificial Sequence: Synthetic peptide
SYSYSAV

SEQ ID NO: 2364 - protein, 7 aa, Artificial Sequence
  Description of Artificial Sequence: Synthetic peptide
SYSYSAI

SEQ ID NO: 2365 - protein, 7 aa, Artificial Sequence
  Description of Artificial Sequence: Synthetic peptide
SYSYSAL

SEQ ID NO: 2366 - protein, 7 aa, Artificial Sequence
  Description of Artificial Sequence: Synthetic peptide
SYSYSAM

SEQ ID NO: 2367 - protein, 10 aa, Artificial Sequence
  Description of Artificial Sequence: Synthetic peptide
YYYYYYSYAI

SEQ ID NO: 2368 - protein, 12 aa, Artificial Sequence
  Description of Artificial Sequence: Synthetic peptide
SSYYYSYYSSGF

SEQ ID NO: 2369 - protein, 12 aa, Artificial Sequence
  Description of Artificial Sequence: Synthetic peptide
SSYSYYYSSSAF

SEQ ID NO: 2370 - protein, 13 aa, Artificial Sequence
  Description of Artificial Sequence: Synthetic peptide
SYYSYYSYSSYAL

SEQ ID NO: 2371 - protein, 13 aa, Artificial Sequence
  Description of Artificial Sequence: Synthetic peptide
SYYSSSSYSSYAL

SEQ ID NO: 2372 - protein, 13 aa, Artificial Sequence
  Description of Artificial Sequence: Synthetic peptide
SYYSSYYYSSYAM

SEQ ID NO: 2373 - protein, 13 aa, Artificial Sequence
  Description of Artificial Sequence: Synthetic peptide
SSYSYYYYSSYAM

SEQ ID NO: 2374 - protein, 13 aa, Artificial Sequence
  Description of Artificial Sequence: Synthetic peptide
SYYSYYYYSSYAI

SEQ ID NO: 2375 - protein, 15 aa, Artificial Sequence
  Description of Artificial Sequence: Synthetic peptide
SYSYSSYSYYYYYGI

SEQ ID NO: 2376 - protein, 15 aa, Artificial Sequence
  Description of Artificial Sequence: Synthetic peptide
SYSYSYYSYYYYSAI

SEQ ID NO: 2377 - protein, 15 aa, Artificial Sequence
  Description of Artificial Sequence: Synthetic peptide
SYSYSSYYSYYYSAI

SEQ ID NO: 2378 - protein, 16 aa, Artificial Sequence
  Description of Artificial Sequence: Synthetic peptide
SSSYSSYYYYSYSSGI

SEQ ID NO: 2379 - protein, 16 aa, Artificial Sequence
  Description of Artificial Sequence: Synthetic peptide
SSSYSSYYYYSYSSGI

SEQ ID NO: 2380 - protein, 16 aa, Artificial Sequence
  Description of Artificial Sequence: Synthetic peptide
YSSYYSSYYYSSYYGF

SEQ ID NO: 2381 - protein, 17 aa, Artificial Sequence
  Description of Artificial Sequence: Synthetic peptide
YYSYSSSYYSSSSYSGF

SEQ ID NO: 2382 - protein, 19 aa, Artificial Sequence
  Description of Artificial Sequence: Synthetic peptide
SYSSYSYYYYYSSSYSYGF

SEQ ID NO: 2383 - protein, 19 aa, Artificial Sequence
  Description of Artificial Sequence: Synthetic peptide
SYSSYYYYSYYSYSSSSGF

SEQ ID NO: 2384 - protein, 9 aa, Artificial Sequence
  Description of Artificial Sequence: Synthetic peptide
QQWWSWPST

SEQ ID NO: 2385 - protein, 9 aa, Artificial Sequence
  Description of Artificial Sequence: Synthetic peptide
QQWWSWPST

SEQ ID NO: 2386 - protein, 9 aa, Artificial Sequence
  Description of Artificial Sequence: Synthetic peptide
QQWWSWPST

SEQ ID NO: 2387 - protein, 9 aa, Artificial Sequence
  Description of Artificial Sequence: Synthetic peptide
QQSWWWPST

SEQ ID NO: 2388 - protein, 9 aa, Artificial Sequence
  Description of Artificial Sequence: Synthetic peptide
QQWWSWPST

SEQ ID NO: 2389 - protein, 9 aa, Artificial Sequence
  Description of Artificial Sequence: Synthetic peptide
QQWWSWPST

SEQ ID NO: 2390 - protein, 9 aa, Artificial Sequence
  Description of Artificial Sequence: Synthetic peptide
QQWWSWPST

SEQ ID NO: 2391 - protein, 9 aa, Artificial Sequence
  Description of Artificial Sequence: Synthetic peptide
QQSWWSPWT

SEQ ID NO: 2392 - protein, 9 aa, Artificial Sequence
  Description of Artificial Sequence: Synthetic peptide
QQSWWSPWT

SEQ ID NO: 2393 - protein, 9 aa, Artificial Sequence
  Description of Artificial Sequence: Synthetic peptide
QQWWSWPST

SEQ ID NO: 2394 - protein, 9 aa, Artificial Sequence
  Description of Artificial Sequence: Synthetic peptide
QQWWSWPST

SEQ ID NO: 2395 - protein, 10 aa, Artificial Sequence
  Description of Artificial Sequence: Synthetic peptide
GFSISSSWIH

SEQ ID NO: 2396 - protein, 10 aa, Artificial Sequence
  Description of Artificial Sequence: Synthetic peptide
GFSIWSSWIH

SEQ ID NO: 2397 - protein, 10 aa, Artificial Sequence
  Description of Artificial Sequence: Synthetic peptide
GFSIWWWSIH

SEQ ID NO: 2398 - protein, 10 aa, Artificial Sequence
  Description of Artificial Sequence: Synthetic peptide
GFWIWSSWIH

SEQ ID NO: 2399 - protein, 10 aa, Artificial Sequence
  Description of Artificial Sequence: Synthetic peptide
GFWISSWWIH

SEQ ID NO: 2400 - protein, 10 aa, Artificial Sequence
  Description of Artificial Sequence: Synthetic peptide
GFSISWSWIH

SEQ ID NO: 2401 - protein, 10 aa, Artificial Sequence
  Description of Artificial Sequence: Synthetic peptide
GFSIWSSWIH

SEQ ID NO: 2402 - protein, 10 aa, Artificial Sequence
  Description of Artificial Sequence: Synthetic peptide
GFSIWSWSIH

SEQ ID NO: 2403 - protein, 10 aa, Artificial Sequence
  Description of Artificial Sequence: Synthetic peptide
GFSIWSSSIH

SEQ ID NO: 2404 - protein, 10 aa, Artificial Sequence
  Description of Artificial Sequence: Synthetic peptide
GFWISWWSIH

SEQ ID NO: 2405 - protein, 10 aa, Artificial Sequence
  Description of Artificial Sequence: Synthetic peptide
GFSISWWSIH

SEQ ID NO: 2406 - protein, 17 aa, Artificial Sequence
  Description of Artificial Sequence: Synthetic peptide
SIWPWWGSTSYADSVKG

SEQ ID NO: 2407 - protein, 17 aa, Artificial Sequence
  Description of Artificial Sequence: Synthetic peptide
SIWPWSGSTSYADSVKG

SEQ ID NO: 2408 - protein, 17 aa, Artificial Sequence
  Description of Artificial Sequence: Synthetic peptide
WISPWWGSTSYADSVKG

SEQ ID NO: 2409 - protein, 17 aa, Artificial Sequence
  Description of Artificial Sequence: Synthetic peptide
SISPWSGWTSYADSVKG

SEQ ID NO: 2410 - protein, 17 aa, Artificial Sequence
  Description of Artificial Sequence: Synthetic peptide
SISPWWGSTSYADSVKG

SEQ ID NO: 2411 - protein, 17 aa, Artificial Sequence
  Description of Artificial Sequence: Synthetic peptide
SIWPSWGWTSYADSVKG

SEQ ID NO: 2412 - protein, 17 aa, Artificial Sequence
  Description of Artificial Sequence: Synthetic peptide
SIWPSWGWTSYADSVKG

SEQ ID NO: 2413 - protein, 17 aa, Artificial Sequence
  Description of Artificial Sequence: Synthetic peptide
SIWPWSGWTSYADSVKG

SEQ ID NO: 2414 - protein, 17 aa, Artificial Sequence
  Description of Artificial Sequence: Synthetic peptide
SIWPWSGWTSYADSVKG

SEQ ID NO: 2415 - protein, 17 aa, Artificial Sequence
  Description of Artificial Sequence: Synthetic peptide
SISPWWGSTSYADSVKG

SEQ ID NO: 2416 - protein, 17 aa, Artificial Sequence
  Description of Artificial Sequence: Synthetic peptide
SISPWWGSTSYADSVKG

SEQ ID NO: 2417 - protein, 6 aa, Artificial Sequence
  Description of Artificial Sequence: Synthetic peptide
SSSWGF

SEQ ID NO: 2418 - protein, 6 aa, Artificial Sequence
  Description of Artificial Sequence: Synthetic peptide
SSSWAF

SEQ ID NO: 2419 - protein, 7 aa, Artificial Sequence
  Description of Artificial Sequence: Synthetic peptide
SSWSSGF

SEQ ID NO: 2420 - protein, 7 aa, Artificial Sequence
  Description of Artificial Sequence: Synthetic peptide
WSWSSAI

SEQ ID NO: 2421 - protein, 7 aa, Artificial Sequence
  Description of Artificial Sequence: Synthetic peptide
SSSWSGM

SEQ ID NO: 2422 - protein, 7 aa, Artificial Sequence
  Description of Artificial Sequence: Synthetic peptide
SSSWSGF

SEQ ID NO: 2423 - protein, 8 aa, Artificial Sequence
  Description of Artificial Sequence: Synthetic peptide
SSSSSSAF

SEQ ID NO: 2424 - protein, 8 aa, Artificial Sequence
  Description of Artificial Sequence: Synthetic peptide
SSWSSWAM

SEQ ID NO: 2425 - protein, 9 aa, Artificial Sequence
  Description of Artificial Sequence: Synthetic peptide
WSSSSWWAL

SEQ ID NO: 2426 - protein, 12 aa, Artificial Sequence
  Description of Artificial Sequence: Synthetic peptide
SWSWSSSWSSAL

SEQ ID NO: 2427 - protein, 12 aa, Artificial Sequence
  Description of Artificial Sequence: Synthetic peptide
SWSWSSWWSSAL

SEQ ID NO: 2428 - protein, 9 aa, Artificial Sequence
  Description of Artificial Sequence: Synthetic peptide
QQFSSSPST

SEQ ID NO: 2429 - protein, 9 aa, Artificial Sequence
  Description of Artificial Sequence: Synthetic peptide
QQSYSSLST

SEQ ID NO: 2430 - protein, 9 aa, Artificial Sequence
  Description of Artificial Sequence: Synthetic peptide
QQSSSYPYS

SEQ ID NO: 2431 - protein, 9 aa, Artificial Sequence
  Description of Artificial Sequence: Synthetic peptide
QESYSSPST

SEQ ID NO: 2432 - protein, 17 aa, Artificial Sequence
  Description of Artificial Sequence: Synthetic peptide
SIYPSYGFTSYADSVKG

SEQ ID NO: 2433 - protein, 17 aa, Artificial Sequence
  Description of Artificial Sequence: Synthetic peptide
SIYPSYGYTYYADSVKG

SEQ ID NO: 2434 - protein, 6 aa, Artificial Sequence
  Description of Artificial Sequence: Synthetic peptide
RRRRAM

SEQ ID NO: 2435 - protein, 6 aa, Artificial Sequence
  Description of Artificial Sequence: Synthetic peptide
RSRRAL

SEQ ID NO: 2436 - protein, 9 aa, Artificial Sequence
  Description of Artificial Sequence: Synthetic peptide
SWSSWSWAF

SEQ ID NO: 2437 - protein, 11 aa, Artificial Sequence
  Description of Artificial Sequence: Synthetic peptide
RRRRSRSRRAL

SEQ ID NO: 2438 - protein, 13 aa, Artificial Sequence
  Description of Artificial Sequence: Synthetic peptide
RSRSRRSRRSRGL

SEQ ID NO: 2439 - protein, 10 aa, Artificial Sequence
  Description of Artificial Sequence: Synthetic peptide
GFSISYFYIH

SEQ ID NO: 2440 - protein, 17 aa, Artificial Sequence
  Description of Artificial Sequence: Synthetic peptide
SIYPYYGFTSYADSVKG

SEQ ID NO: 2441 - protein, 17 aa, Artificial Sequence
  Description of Artificial Sequence: Synthetic peptide
SISPFSGYTSYADSVKG

SEQ ID NO: 2442 - protein, 12 aa, Artificial Sequence
  Description of Artificial Sequence: Synthetic peptide
SSSWSWSSWWAM

SEQ ID NO: 2443 - protein, 11 aa, Artificial Sequence
  Description of Artificial Sequence: Synthetic peptide
SRSSRRSRSAF

SEQ ID NO: 2444 - protein, 14 aa, Artificial Sequence
  Description of Artificial Sequence: Synthetic peptide
FFFFSSFFFSFSGF

SEQ ID NO: 2445 - protein, 10 aa, Artificial Sequence
  Description of Artificial Sequence: Synthetic peptide
SWSWWSWSGM

SEQ ID NO: 2446 - protein, 8 aa, Artificial Sequence
  Description of Artificial Sequence: Synthetic peptide
SSFFFFAM

SEQ ID NO: 2447 - protein, 8 aa, Artificial Sequence
  Description of Artificial Sequence: Synthetic peptide
SSFFSFAF

SEQ ID NO: 2448 - protein, 14 aa, Artificial Sequence
  Description of Artificial Sequence: Synthetic peptide
FSFFFSSFFSFSGL

SEQ ID NO: 2449 - protein, 6 aa, Artificial Sequence
  Description of Artificial Sequence: Synthetic peptide
RRSRAL

SEQ ID NO: 2450 - protein, 6 aa, Artificial Sequence
  Description of Artificial Sequence: Synthetic peptide
RRSRGI

SEQ ID NO: 2451 - protein, 8 aa, Artificial Sequence
  Description of Artificial Sequence: Synthetic peptide
SRRSRRGM

SEQ ID NO: 2452 - protein, 8 aa, Artificial Sequence
  Description of Artificial Sequence: Synthetic peptide
SRRRSRAF

SEQ ID NO: 2453 - protein, 8 aa, Artificial Sequence
  Description of Artificial Sequence: Synthetic peptide
SRRSRRGL

SEQ ID NO: 2454 - protein, 8 aa, Artificial Sequence
  Description of Artificial Sequence: Synthetic peptide
SRRSRRAL

SEQ ID NO: 2455 - protein, 8 aa, Artificial Sequence
  Description of Artificial Sequence: Synthetic peptide
SRRSRRAM

SEQ ID NO: 2456 - protein, 8 aa, Artificial Sequence
  Description of Artificial Sequence: Synthetic peptide
SSRSSRAM

SEQ ID NO: 2457 - protein, 8 aa, Artificial Sequence
  Description of Artificial Sequence: Synthetic peptide
SRSRRRGL

SEQ ID NO: 2458 - protein, 9 aa, Artificial Sequence
  Description of Artificial Sequence: Synthetic peptide
SRSRSSRAL

SEQ ID NO: 2459 - protein, 9 aa, Artificial Sequence
  Description of Artificial Sequence: Synthetic peptide
SRSRSSRAI

SEQ ID NO: 2460 - protein, 9 aa, Artificial Sequence
  Description of Artificial Sequence: Synthetic peptide
SRSRSSRVM

SEQ ID NO: 2461 - protein, 9 aa, Artificial Sequence
  Description of Artificial Sequence: Synthetic peptide
SRSRSSRGM

SEQ ID NO: 2462 - protein, 10 aa, Artificial Sequence
  Description of Artificial Sequence: Synthetic peptide
SRSRSRSRGM

SEQ ID NO: 2463 - protein, 10 aa, Artificial Sequence
  Description of Artificial Sequence: Synthetic peptide
SRSRRRSRGM

SEQ ID NO: 2464 - protein, 11 aa, Artificial Sequence
  Description of Artificial Sequence: Synthetic peptide
RSSSRSRRRGF

SEQ ID NO: 2465 - protein, 13 aa, Artificial Sequence
  Description of Artificial Sequence: Synthetic peptide
SRSRRSSSSRRGM

SEQ ID NO: 2466 - protein, 13 aa, Artificial Sequence
  Description of Artificial Sequence: Synthetic peptide
SSRRSSRSRSRGF

SEQ ID NO: 2467 - protein, 13 aa, Artificial Sequence
  Description of Artificial Sequence: Synthetic peptide
SRSRRSRSSSSAM

SEQ ID NO: 2468 - protein, 13 aa, Artificial Sequence
  Description of Artificial Sequence: Synthetic peptide
SSSRRRSRRSSAM

SEQ ID NO: 2469 - protein, 13 aa, Artificial Sequence
  Description of Artificial Sequence: Synthetic peptide
SRSRRSSRRSRGF

SEQ ID NO: 2470 - protein, 13 aa, Artificial Sequence
  Description of Artificial Sequence: Synthetic peptide
SRSRRSRSRSRGM

SEQ ID NO: 2471 - protein, 13 aa, Artificial Sequence
  Description of Artificial Sequence: Synthetic peptide
SSRRRSRRSSSAL

SEQ ID NO: 2472 - protein, 13 aa, Artificial Sequence
  Description of Artificial Sequence: Synthetic peptide
SSSRRRRRSSSAF

SEQ ID NO: 2473 - protein, 15 aa, Artificial Sequence
  Description of Artificial Sequence: Synthetic peptide
SRSRRSSSSSRRRGF

SEQ ID NO: 2474 - protein, 9 aa, Artificial Sequence
  Description of Artificial Sequence: Synthetic peptide
QQFYSYPST

SEQ ID NO: 2475 - protein, 10 aa, Artificial Sequence
  Description of Artificial Sequence: Synthetic peptide
GFYIYFYSIH

SEQ ID NO: 2476 - protein, 10 aa, Artificial Sequence
  Description of Artificial Sequence: Synthetic peptide
GFYISYYFIH

SEQ ID NO: 2477 - protein, 10 aa, Artificial Sequence
  Description of Artificial Sequence: Synthetic peptide
GFSIYFYSIH

SEQ ID NO: 2478 - protein, 10 aa, Artificial Sequence
  Description of Artificial Sequence: Synthetic peptide
GFYFSYYYIH

SEQ ID NO: 2479 - protein, 17 aa, Artificial Sequence
  Description of Artificial Sequence: Synthetic peptide
SISPYYGYTFYADSVKG

SEQ ID NO: 2480 - protein, 17 aa, Artificial Sequence
  Description of Artificial Sequence: Synthetic peptide
SISPYYGFTSYADSVKG

SEQ ID NO: 2481 - protein, 17 aa, Artificial Sequence
  Description of Artificial Sequence: Synthetic peptide
SIFPYYGYTSYADSVKG

SEQ ID NO: 2482 - protein, 17 aa, Artificial Sequence
  Description of Artificial Sequence: Synthetic peptide
FISPYYGYTYYADSVKG

SEQ ID NO: 2483 - protein, 17 aa, Artificial Sequence
  Description of Artificial Sequence: Synthetic peptide
FISPYYGYTSYSDSVKG

SEQ ID NO: 2484 - protein, 13 aa, Artificial Sequence
  Description of Artificial Sequence: Synthetic peptide
SYYSYSSYSSYGL

SEQ ID NO: 2485 - protein, 13 aa, Artificial Sequence
  Description of Artificial Sequence: Synthetic peptide
YYYSYSSYSSSGF

SEQ ID NO: 2486 - protein, 13 aa, Artificial Sequence
  Description of Artificial Sequence: Synthetic peptide
YYYSYSSYSYSGM

SEQ ID NO: 2487 - protein, 13 aa, Artificial Sequence
  Description of Artificial Sequence: Synthetic peptide
YYYSYSSYSYSGL

SEQ ID NO: 2488 - protein, 13 aa, Artificial Sequence
  Description of Artificial Sequence: Synthetic peptide
YYYSYSSYSYSAL

SEQ ID NO: 2489 - protein, 13 aa, Artificial Sequence
  Description of Artificial Sequence: Synthetic peptide
YYYSYSSYSYSAM

SEQ ID NO: 2490 - protein, 14 aa, Artificial Sequence
  Description of Artificial Sequence: Synthetic peptide
SSYSYSSYSYYSGI

SEQ ID NO: 2491 - protein, 14 aa, Artificial Sequence
  Description of Artificial Sequence: Synthetic peptide
SSYSYSSYSSYSGM

SEQ ID NO: 2492 - protein, 14 aa, Artificial Sequence
  Description of Artificial Sequence: Synthetic peptide
SSYSYSSYSSYYGM

SEQ ID NO: 2493 - protein, 14 aa, Artificial Sequence
  Description of Artificial Sequence: Synthetic peptide
SYYSYSSSYYSYGF

SEQ ID NO: 2494 - protein, 14 aa, Artificial Sequence
  Description of Artificial Sequence: Synthetic peptide
SYYSYSSSSYYYAL

SEQ ID NO: 2495 - protein, 14 aa, Artificial Sequence
  Description of Artificial Sequence: Synthetic peptide
SYYSYSSYSYYYGM

SEQ ID NO: 2496 - protein, 14 aa, Artificial Sequence
  Description of Artificial Sequence: Synthetic peptide
SYYSYSSYSYYYAM

SEQ ID NO: 2497 - protein, 14 aa, Artificial Sequence
  Description of Artificial Sequence: Synthetic peptide
SYYSYSSYYSYYGM

SEQ ID NO: 2498 - protein, 14 aa, Artificial Sequence
  Description of Artificial Sequence: Synthetic peptide
SYYSYSSYYYYYAM

SEQ ID NO: 2499 - protein, 14 aa, Artificial Sequence
  Description of Artificial Sequence: Synthetic peptide
SYYSYSYSSYYYGL

SEQ ID NO: 2500 - protein, 14 aa, Artificial Sequence
  Description of Artificial Sequence: Synthetic peptide
SYYSYSYYSYSYGI

SEQ ID NO: 2501 - protein, 14 aa, Artificial Sequence
  Description of Artificial Sequence: Synthetic peptide
SYYSYYSYSSYYGL

SEQ ID NO: 2502 - protein, 14 aa, Artificial Sequence
  Description of Artificial Sequence: Synthetic peptide
YSYSYSSSSYYSAL

SEQ ID NO: 2503 - protein, 14 aa, Artificial Sequence
  Description of Artificial Sequence: Synthetic peptide
YSYSYSSYSSSSGL

SEQ ID NO: 2504 - protein, 14 aa, Artificial Sequence
  Description of Artificial Sequence: Synthetic peptide
YSYSYSSYSSYSAF

SEQ ID NO: 2505 - protein, 14 aa, Artificial Sequence
  Description of Artificial Sequence: Synthetic peptide
YSYSYSSYSSYSGF

SEQ ID NO: 2506 - protein, 14 aa, Artificial Sequence
  Description of Artificial Sequence: Synthetic peptide
YSYSYSSYSSYSGL

SEQ ID NO: 2507 - protein, 14 aa, Artificial Sequence
  Description of Artificial Sequence: Synthetic peptide
YSYSYSSYSYYSGM

SEQ ID NO: 2508 - protein, 14 aa, Artificial Sequence
  Description of Artificial Sequence: Synthetic peptide
YSYSYSSYSYYSAF

SEQ ID NO: 2509 - protein, 14 aa, Artificial Sequence
  Description of Artificial Sequence: Synthetic peptide
YSYSYSSYSYYSGM

SEQ ID NO: 2510 - protein, 14 aa, Artificial Sequence
  Description of Artificial Sequence: Synthetic peptide
YSYSYSSYSYYSGL

SEQ ID NO: 2511 - protein, 14 aa, Artificial Sequence
  Description of Artificial Sequence: Synthetic peptide
YSYSYSSYSYYSGL

SEQ ID NO: 2512 - protein, 14 aa, Artificial Sequence
  Description of Artificial Sequence: Synthetic peptide
YSYSYSSYSYYSGF

SEQ ID NO: 2513 - protein, 14 aa, Artificial Sequence
  Description of Artificial Sequence: Synthetic peptide
YSYSYSSYSYYYGF

SEQ ID NO: 2514 - protein, 14 aa, Artificial Sequence
  Description of Artificial Sequence: Synthetic peptide
YSYSYSYSYYYSAF

SEQ ID NO: 2515 - protein, 14 aa, Artificial Sequence
  Description of Artificial Sequence: Synthetic peptide
YSYSYSYSYSYSAF

SEQ ID NO: 2516 - protein, 14 aa, Artificial Sequence
  Description of Artificial Sequence: Synthetic peptide
YSYYYSSYSYYSGL

SEQ ID NO: 2517 - protein, 14 aa, Artificial Sequence
  Description of Artificial Sequence: Synthetic peptide
YSYYYSYSSSYSAL

SEQ ID NO: 2518 - protein, 14 aa, Artificial Sequence
  Description of Artificial Sequence: Synthetic peptide
YYSSSYYYSYYYGM

SEQ ID NO: 2519 - protein, 14 aa, Artificial Sequence
  Description of Artificial Sequence: Synthetic peptide
YYYSYSSSSSYYGM

SEQ ID NO: 2520 - protein, 14 aa, Artificial Sequence
  Description of Artificial Sequence: Synthetic peptide
YYYSYSSSSSYYGF

SEQ ID NO: 2521 - protein, 14 aa, Artificial Sequence
  Description of Artificial Sequence: Synthetic peptide
YYYSYSSSSYYSGL

SEQ ID NO: 2522 - protein, 14 aa, Artificial Sequence
  Description of Artificial Sequence: Synthetic peptide
YYYSYSSSSYYSGF

SEQ ID NO: 2523 - protein, 14 aa, Artificial Sequence
  Description of Artificial Sequence: Synthetic peptide
YYYSYSSSSYYSGM

SEQ ID NO: 2524 - protein, 14 aa, Artificial Sequence
  Description of Artificial Sequence: Synthetic peptide
YYYSYSSSYSYSAF

SEQ ID NO: 2525 - protein, 14 aa, Artificial Sequence
  Description of Artificial Sequence: Synthetic peptide
YYYSYSSYSSSSGL

SEQ ID NO: 2526 - protein, 14 aa, Artificial Sequence
  Description of Artificial Sequence: Synthetic peptide
YYYSYSSYSSSYGF

SEQ ID NO: 2527 - protein, 14 aa, Artificial Sequence
  Description of Artificial Sequence: Synthetic peptide
YYYSYSSYSSSYGL

SEQ ID NO: 2528 - protein, 14 aa, Artificial Sequence
  Description of Artificial Sequence: Synthetic peptide
YYYSYSSYSSYSAM

SEQ ID NO: 2529 - protein, 14 aa, Artificial Sequence
  Description of Artificial Sequence: Synthetic peptide
YYYSYSSYSSYYGI

SEQ ID NO: 2530 - protein, 14 aa, Artificial Sequence
  Description of Artificial Sequence: Synthetic peptide
YYYSYSSYSSYYGM

SEQ ID NO: 2531 - protein, 14 aa, Artificial Sequence
  Description of Artificial Sequence: Synthetic peptide
YYYSYSSYSSYYAF

SEQ ID NO: 2532 - protein, 14 aa, Artificial Sequence
  Description of Artificial Sequence: Synthetic peptide
YYYSYSSYSYSSGI

SEQ ID NO: 2533 - protein, 14 aa, Artificial Sequence
  Description of Artificial Sequence: Synthetic peptide
YYYSYSSYSYSSGF

SEQ ID NO: 2534 - protein, 14 aa, Artificial Sequence
  Description of Artificial Sequence: Synthetic peptide
YYYSYSSYSYSYGL

SEQ ID NO: 2535 - protein, 14 aa, Artificial Sequence
  Description of Artificial Sequence: Synthetic peptide
YYYSYSSYSYSYGM

SEQ ID NO: 2536 - protein, 14 aa, Artificial Sequence
  Description of Artificial Sequence: Synthetic peptide
YYYSYSSYSYYSAF

SEQ ID NO: 2537 - protein, 14 aa, Artificial Sequence
  Description of Artificial Sequence: Synthetic peptide
YYYSYSSYYSSYGM

SEQ ID NO: 2538 - protein, 14 aa, Artificial Sequence
  Description of Artificial Sequence: Synthetic peptide
YYYSYSYSSSYYAL

SEQ ID NO: 2539 - protein, 14 aa, Artificial Sequence
  Description of Artificial Sequence: Synthetic peptide
YYYSYSYSSSYYGL

SEQ ID NO: 2540 - protein, 14 aa, Artificial Sequence
  Description of Artificial Sequence: Synthetic peptide
YYYSYSYSSYYSAF

SEQ ID NO: 2541 - protein, 14 aa, Artificial Sequence
  Description of Artificial Sequence: Synthetic peptide
YYYSYYSSSSYYGM

SEQ ID NO: 2542 - protein, 14 aa, Artificial Sequence
  Description of Artificial Sequence: Synthetic peptide
YYYSYYSYSSYSAM

SEQ ID NO: 2543 - protein, 14 aa, Artificial Sequence
  Description of Artificial Sequence: Synthetic peptide
YYYSYYSYSYYYGM

SEQ ID NO: 2544 - protein, 14 aa, Artificial Sequence
  Description of Artificial Sequence: Synthetic peptide
YYYSYYSYSSYSGM

SEQ ID NO: 2545 - protein, 14 aa, Artificial Sequence
  Description of Artificial Sequence: Synthetic peptide
YYYSYYSYSSYSGL

SEQ ID NO: 2546 - protein, 14 aa, Artificial Sequence
  Description of Artificial Sequence: Synthetic peptide
YYYSYYYSSYYSAF

SEQ ID NO: 2547 - protein, 14 aa, Artificial Sequence
  Description of Artificial Sequence: Synthetic peptide
YYYYYSSSYSYSAF

SEQ ID NO: 2548 - protein, 15 aa, Artificial Sequence
  Description of Artificial Sequence: Synthetic peptide
YSYSYSYSYSSYSAL

SEQ ID NO: 2549 - protein, 15 aa, Artificial Sequence
  Description of Artificial Sequence: Synthetic peptide
YSYSYSYYSSSYSAF

SEQ ID NO: 2550 - protein, 15 aa, Artificial Sequence
  Description of Artificial Sequence: Synthetic peptide
YYYSYSSSSSSYYGF

SEQ ID NO: 2551 - protein, 15 aa, Artificial Sequence
  Description of Artificial Sequence: Synthetic peptide
YYYSYSSSYSYSYGM

SEQ ID NO: 2552 - protein, 15 aa, Artificial Sequence
  Description of Artificial Sequence: Synthetic peptide
YYYSYSYSSSSYYGF

SEQ ID NO: 2553 - protein, 15 aa, Artificial Sequence
  Description of Artificial Sequence: Synthetic peptide
YYYSYSYSSSSYYGL

SEQ ID NO: 2554 - protein, 15 aa, Artificial Sequence
  Description of Artificial Sequence: Synthetic peptide
YYYSYSYYSSSYYGF

SEQ ID NO: 2555 - protein, 15 aa, Artificial Sequence
  Description of Artificial Sequence: Synthetic peptide
YYYSYYSYSSYSYGM

SEQ ID NO: 2556 - protein, 15 aa, Artificial Sequence
  Description of Artificial Sequence: Synthetic peptide
YYYSYYYSSSSYYAL

SEQ ID NO: 2557 - protein, 16 aa, Artificial Sequence
  Description of Artificial Sequence: Synthetic peptide
YSYSYSSYSYYSSSGF

SEQ ID NO: 2558 - protein, 16 aa, Artificial Sequence
  Description of Artificial Sequence: Synthetic peptide
YYYSYSSYSYSYSYGF

SEQ ID NO: 2559 - protein, 16 aa, Artificial Sequence
  Description of Artificial Sequence: Synthetic peptide
YYYSYSSYSSSSSYGM

SEQ ID NO: 2560 - protein, 16 aa, Artificial Sequence
  Description of Artificial Sequence: Synthetic peptide
YYYSYSSYSYYSSYAL

SEQ ID NO: 2561 - protein, 16 aa, Artificial Sequence
  Description of Artificial Sequence: Synthetic peptide
YYYSYSYSYYSSYYAF

SEQ ID NO: 2562 - protein, 16 aa, Artificial Sequence
  Description of Artificial Sequence: Synthetic peptide
YYYSYSYSSSSYYSGL

SEQ ID NO: 2563 - protein, 9 aa, Artificial Sequence
  Description of Artificial Sequence: Synthetic peptide
QQHYTTPTY

SEQ ID NO: 2564 - protein, 9 aa, Artificial Sequence
  Description of Artificial Sequence: Synthetic peptide
QQRRRSPRT

SEQ ID NO: 2565 - protein, 9 aa, Artificial Sequence
  Description of Artificial Sequence: Synthetic peptide
QQSSSSPRT

SEQ ID NO: 2566 - protein, 9 aa, Artificial Sequence
  Description of Artificial Sequence: Synthetic peptide
QQFSSFPST

SEQ ID NO: 2567 - protein, 9 aa, Artificial Sequence
  Description of Artificial Sequence: Synthetic peptide
QQFFSFPFT

SEQ ID NO: 2568 - protein, 10 aa, Artificial Sequence
  Description of Artificial Sequence: Synthetic peptide
GFSISRRSIH

SEQ ID NO: 2569 - protein, 10 aa, Artificial Sequence
  Description of Artificial Sequence: Synthetic peptide
GFSIRSSSIH

SEQ ID NO: 2570 - protein, 10 aa, Artificial Sequence
  Description of Artificial Sequence: Synthetic peptide
GFRIRRSSIH

SEQ ID NO: 2571 - protein, 10 aa, Artificial Sequence
  Description of Artificial Sequence: Synthetic peptide
GFRIRSSSIH

SEQ ID NO: 2572 - protein, 10 aa, Artificial Sequence
  Description of Artificial Sequence: Synthetic peptide
GFRIRRSRIH

SEQ ID NO: 2573 - protein, 10 aa, Artificial Sequence
  Description of Artificial Sequence: Synthetic peptide
GFFFFFSFIH

SEQ ID NO: 2574 - protein, 10 aa, Artificial Sequence
  Description of Artificial Sequence: Synthetic peptide
GFSISFSSIH

SEQ ID NO: 2575 - protein, 10 aa, Artificial Sequence
  Description of Artificial Sequence: Synthetic peptide
GFSILSSWIH

SEQ ID NO: 2576 - protein, 10 aa, Artificial Sequence
  Description of Artificial Sequence: Synthetic peptide
GFFIFYYYIH

SEQ ID NO: 2577 - protein, 10 aa, Artificial Sequence
  Description of Artificial Sequence: Synthetic peptide
GFYIYYFSIH

SEQ ID NO: 2578 - protein, 10 aa, Artificial Sequence
  Description of Artificial Sequence: Synthetic peptide
GFYISYFYIH

SEQ ID NO: 2579 - protein, 10 aa, Artificial Sequence
  Description of Artificial Sequence: Synthetic peptide
GFYISYFSIH

SEQ ID NO: 2580 - protein, 10 aa, Artificial Sequence
  Description of Artificial Sequence: Synthetic peptide
GFSIYYFYIH

SEQ ID NO: 2581 - protein, 17 aa, Artificial Sequence
  Description of Artificial Sequence: Synthetic peptide
RISPRRGSTSYADSVKG

SEQ ID NO: 2582 - protein, 17 aa, Artificial Sequence
  Description of Artificial Sequence: Synthetic peptide
SIRPSSGRTSYADSVKG

SEQ ID NO: 2583 - protein, 17 aa, Artificial Sequence
  Description of Artificial Sequence: Synthetic peptide
SIRPRSGRTRYADSVKG

SEQ ID NO: 2584 - protein, 17 aa, Artificial Sequence
  Description of Artificial Sequence: Synthetic peptide
SISPRRGRTSYADSVKG

SEQ ID NO: 2585 - protein, 17 aa, Artificial Sequence
  Description of Artificial Sequence: Synthetic peptide
RISPRSGSTSYADSVKG

SEQ ID NO: 2586 - protein, 17 aa, Artificial Sequence
  Description of Artificial Sequence: Synthetic peptide
SIRPRRGRTRYADSVKG

SEQ ID NO: 2587 - protein, 17 aa, Artificial Sequence
  Description of Artificial Sequence: Synthetic peptide
SIRPRRGRTSYADSVKG

SEQ ID NO: 2588 - protein, 17 aa, Artificial Sequence
  Description of Artificial Sequence: Synthetic peptide
RISPSSGSTSYADSVKG

SEQ ID NO: 2589 - protein, 17 aa, Artificial Sequence
  Description of Artificial Sequence: Synthetic peptide
WISPSSGWTSYADSVKG

SEQ ID NO: 2590 - protein, 17 aa, Artificial Sequence
  Description of Artificial Sequence: Synthetic peptide
FIFPSFGFSSYADSVKG

SEQ ID NO: 2591 - protein, 17 aa, Artificial Sequence
  Description of Artificial Sequence: Synthetic peptide
FISPFSGSTSYADSVKG

SEQ ID NO: 2592 - protein, 17 aa, Artificial Sequence
  Description of Artificial Sequence: Synthetic peptide
FISPFFGSTFYADSVKG

SEQ ID NO: 2593 - protein, 17 aa, Artificial Sequence
  Description of Artificial Sequence: Synthetic peptide
SISPYSGFTSYADSVKG

SEQ ID NO: 2594 - protein, 17 aa, Artificial Sequence
  Description of Artificial Sequence: Synthetic peptide
SIYPYSGYTFYADSVKG

SEQ ID NO: 2595 - protein, 10 aa, Artificial Sequence
  Description of Artificial Sequence: Synthetic peptide
SSSRRSSRGL

SEQ ID NO: 2596 - protein, 13 aa, Artificial Sequence
  Description of Artificial Sequence: Synthetic peptide
SSRSSSSRRSSAF

SEQ ID NO: 2597 - protein, 8 aa, Artificial Sequence
  Description of Artificial Sequence: Synthetic peptide
SRSSSSGF

SEQ ID NO: 2598 - protein, 8 aa, Artificial Sequence
  Description of Artificial Sequence: Synthetic peptide
SSRSSSGF

SEQ ID NO: 2599 - protein, 10 aa, Artificial Sequence
  Description of Artificial Sequence: Synthetic peptide
SSRSRRRSGM

SEQ ID NO: 2600 - protein, 8 aa, Artificial Sequence
  Description of Artificial Sequence: Synthetic peptide
SRSRSSGL

SEQ ID NO: 2601 - protein, 10 aa, Artificial Sequence
  Description of Artificial Sequence: Synthetic peptide
SRRSSRRSAM

SEQ ID NO: 2602 - protein, 6 aa, Artificial Sequence
  Description of Artificial Sequence: Synthetic peptide
SSRSGL

SEQ ID NO: 2603 - protein, 6 aa, Artificial Sequence
  Description of Artificial Sequence: Synthetic peptide
WSWSGF

SEQ ID NO: 2604 - protein, 10 aa, Artificial Sequence
  Description of Artificial Sequence: Synthetic peptide
WSSSWWWSGM

SEQ ID NO: 2605 - protein, 6 aa, Artificial Sequence
  Description of Artificial Sequence: Synthetic peptide
FSSFAF

SEQ ID NO: 2606 - protein, 8 aa, Artificial Sequence
  Description of Artificial Sequence: Synthetic peptide
SSFFSFGF

SEQ ID NO: 2607 - protein, 8 aa, Artificial Sequence
  Description of Artificial Sequence: Synthetic peptide
SSFFSFGM

SEQ ID NO: 2608 - protein, 7 aa, Artificial Sequence
  Description of Artificial Sequence: Synthetic peptide
SWWSSAL

SEQ ID NO: 2609 - protein, 7 aa, Artificial Sequence
  Description of Artificial Sequence: Synthetic peptide
SYSYSAF

SEQ ID NO: 2610 - protein, 7 aa, Artificial Sequence
  Description of Artificial Sequence: Synthetic peptide
YYSYYGS

SEQ ID NO: 2611 - protein, 7 aa, Artificial Sequence
  Description of Artificial Sequence: Synthetic peptide
SYSYYVM

SEQ ID NO: 2612 - protein, 10 aa, Artificial Sequence
  Description of Artificial Sequence: Synthetic peptide
YSYYYYSYAI

SEQ ID NO: 2613 - protein, 12 aa, Artificial Sequence
  Description of Artificial Sequence: Synthetic peptide
SSYYSSYYYSGM

SEQ ID NO: 2614 - protein, 12 aa, Artificial Sequence
  Description of Artificial Sequence: Synthetic peptide
SSYSSYYSSYAL

SEQ ID NO: 2615 - protein, 12 aa, Artificial Sequence
  Description of Artificial Sequence: Synthetic peptide
SSYYYSYYYSGF

SEQ ID NO: 2616 - protein, 12 aa, Artificial Sequence
  Description of Artificial Sequence: Synthetic peptide
SSYYSSYYSSGL

SEQ ID NO: 2617 - protein, 13 aa, Artificial Sequence
  Description of Artificial Sequence: Synthetic peptide
SYYSYYYYSSYAF

SEQ ID NO: 2618 - protein, 13 aa, Artificial Sequence
  Description of Artificial Sequence: Synthetic peptide
SYYSSYSYSSYAI

SEQ ID NO: 2619 - protein, 13 aa, Artificial Sequence
  Description of Artificial Sequence: Synthetic peptide
SYYSSSSYSSYAF

SEQ ID NO: 2620 - protein, 14 aa, Artificial Sequence
  Description of Artificial Sequence: Synthetic peptide
YSYYSSYYYSYSAF

SEQ ID NO: 2621 - protein, 15 aa, Artificial Sequence
  Description of Artificial Sequence: Synthetic peptide
SYSYSSSYYYYYSAM

SEQ ID NO: 2622 - protein, 15 aa, Artificial Sequence
  Description of Artificial Sequence: Synthetic peptide
SYSYSSYSYYYYSAI

SEQ ID NO: 2623 - protein, 15 aa, Artificial Sequence
  Description of Artificial Sequence: Synthetic peptide
SYSYSSYSYYYSSAI

SEQ ID NO: 2624 - protein, 16 aa, Artificial Sequence
  Description of Artificial Sequence: Synthetic peptide
SSSYSYYSYYSYSSGL

SEQ ID NO: 2625 - protein, 16 aa, Artificial Sequence
  Description of Artificial Sequence: Synthetic peptide
SSSYSSYYYYSYSSGM

SEQ ID NO: 2626 - protein, 12 aa, Artificial Sequence
  Description of Artificial Sequence: Synthetic peptide
GYYYSYYSGYAL

SEQ ID NO: 2627 - protein, 8 aa, Artificial Sequence
  Description of Artificial Sequence: Synthetic peptide
GGGYGYGI

SEQ ID NO: 2628 - protein, 15 aa, Artificial Sequence
  Description of Artificial Sequence: Synthetic peptide
EYYQGYGPYRSTYGL

SEQ ID NO: 2629 - protein, 10 aa, Artificial Sequence
  Description of Artificial Sequence: Synthetic peptide
  MOD_RES (4)..(4): Phe, Leu, Ile or Val
  MOD_RES (5)..(8): Tyr or Ser
  MOD_RES (9)..(9): Met or Ile
GFNXXXXXXH

SEQ ID NO: 2630 - protein, 17 aa, Artificial Sequence
  Description of Artificial Sequence: Synthetic peptide
  MOD_RES (1)..(1): Tyr or Ser
  MOD_RES (3)..(3): Tyr or Ser
  MOD_RES (4)..(4): Pro or Ser
  MOD_RES (5)..(6): Tyr or Ser
  MOD_RES (7)..(7): Gly or Ser
  MOD_RES (8)..(8): Tyr or Ser
  MOD_RES (10)..(10): Tyr or Ser
XIXXXXXXTXYADSVKG

SEQ ID NO: 2631 - protein, 21 aa, Artificial Sequence
  Description of Artificial Sequence: Synthetic peptide
  MOD_RES (1)..(6): Tyr or Ser
  MOD_RES (7)..(17): Tyr, Ser or not present
  MOD_RES (18)..(18): Gly or Ala
  MOD_RES (19)..(19): Phe, Leu, Ile or Met
XXXXXXXXXXXXXXXXXXXDY

SEQ ID NO: 2632 - protein, 21 aa, Artificial Sequence
  Description of Artificial Sequence: Synthetic peptide
  MOD_RES (1)..(6): Tyr, Ser, Gly, Ala, Asp, Glu, Phe, His, Ile, Lys, Leu, Met, Asn, Pro, Gln, Arg, Thr, Val or Trp
  MOD_RES (7)..(17): Tyr, Ser, Gly, Ala, Asp, Glu, Phe, His, Ile, Lys, Leu, Met, Asn, Pro, Gln, Arg, Thr, Val, Trp or not present
  MOD_RES (18)..(18): Gly or Ala
  MOD_RES (19)..(19): Phe, Leu, Ile or Met
  see specification as filed for detailed description of substitutions and preferred embodiments
XXXXXXXXXXXXXXXXXXXDY

SEQ ID NO: 2633 - protein, 9 aa, Artificial Sequence
  Description of Artificial Sequence: Synthetic peptide
  MOD_RES (1)..(5): Tyr, Ser, Gly, Ala, Asp, Glu, Phe, His, Ile, Lys, Leu, Met, Asn, Pro, Gln, Arg, Thr, Val or Trp
  MOD_RES (6)..(6): Gly or Ala
  MOD_RES (7)..(7): Phe, Leu, Ile or Met
  see specification as filed for detailed description of substitutions and preferred embodiments
XXXXXXXDY

SEQ ID NO: 2634 - protein, 10 aa, Artificial Sequence
  Description of Artificial Sequence: Synthetic peptide
  MOD_RES (3)..(3): Tyr or Ser
  MOD_RES (5)..(8): Tyr or Ser
GFXIXXXXIH

SEQ ID NO: 2635 - protein, 17 aa, Artificial Sequence
  Description of Artificial Sequence: Synthetic peptide
  MOD_RES (1)..(1): Tyr or Ser
  MOD_RES (3)..(3): Tyr or Ser
  MOD_RES (5)..(6): Tyr or Ser
  MOD_RES (8)..(8): Tyr or Ser
  MOD_RES (10)..(10): Tyr or Ser
XIXPXXGXTXYADSVKG

SEQ ID NO: 2636 - protein, 21 aa, Artificial Sequence
  Description of Artificial Sequence: Synthetic peptide
  MOD_RES (1)..(6): Tyr, Ser or Gly
  MOD_RES (7)..(17): Tyr, Ser, Gly or not present
  MOD_RES (18)..(18): Gly or Ala
  MOD_RES (19)..(19): Ile, Met, Leu or Phe
  see specification as filed for detailed description of substitutions and preferred embodiments
XXXXXXXXXXXXXXXXXXXDY

SEQ ID NO: 2637 - protein, 21 aa, Artificial Sequence
  Description of Artificial Sequence: Synthetic peptide
  MOD_RES (1)..(6): Tyr, Ser or Arg
  MOD_RES (7)..(17): Tyr, Ser, Arg or not present
  MOD_RES (18)..(18): Gly or Ala
  MOD_RES (19)..(19): Ile, Met, Leu or Phe
  see specification as filed for detailed description of substitutions and preferred embodiments
XXXXXXXXXXXXXXXXXXXDY

SEQ ID NO: 2638 - protein, 21 aa, Artificial Sequence
  Description of Artificial Sequence: Synthetic peptide
  MOD_RES (1)..(6): Tyr, Ser, Gly or Arg
  MOD_RES (7)..(17): Tyr, Ser, Gly, Arg or not present
  MOD_RES (18)..(18): Gly or Ala
  MOD_RES (19)..(19): Ile, Met, Leu or Phe
  see specification as filed for detailed description of substitutions and preferred embodiments
XXXXXXXXXXXXXXXXXXXDY

SEQ ID NO: 2639 - protein, 21 aa, Artificial Sequence
  Description of Artificial Sequence: Synthetic peptide
  MOD_RES (1)..(6): Tyr, Ser, Gly, Arg, Ala, Asp, Glu, Phe, His, Ile, Lys, Leu, Met, Asn, Pro, Gln, Thr, Val or Trp
  MOD_RES (7)..(17): Tyr, Ser, Gly, Arg, Ala, Asp, Glu, Phe, His, Ile, Lys, Leu, Met, Asn, Pro, Gln, Thr, Val, Trp or not present
  MOD_RES (18)..(18): Gly or Ala
  MOD_RES (19)..(19): Ile, Met, Leu or Phe
  see specification as filed for detailed description of substitutions and preferred embodiments
XXXXXXXXXXXXXXXXXXXDY

SEQ ID NO: 2640 - protein, 19 aa, Artificial Sequence
  Description of Artificial Sequence: Synthetic peptide
  MOD_RES (1)..(18): Ser, Ala, Cys, Phe, Gly, Ile, Leu, Asn, Pro, Arg, Thr, Trp or Tyr or not present
  MOD_RES (19)..(19): Ser, Ala, Cys, Phe, Gly, Ile, Leu, Asn, Pro, Arg, Thr, Trp, Tyr, Met or not present
  see specification as filed for detailed description of substitutions and preferred embodiments
XXXXXXXXXXXXXXXXXXX

SEQ ID NO: 2641 - protein, 10 aa, Artificial Sequence
  Description of Artificial Sequence: Synthetic peptide
  MOD_RES (3)..(3): Ser, Tyr, Trp, Arg or Phe
  MOD_RES (5)..(8): Ser, Tyr, Trp, Arg or Phe
  see specification as filed for detailed description of substitutions and preferred embodiments
GFXIXXXXIH

SEQ ID NO: 2642 - protein, 17 aa, Artificial Sequence
  Description of Artificial Sequence: Synthetic peptide
  MOD_RES (1)..(1): Ser, Tyr, Trp, Arg or Phe
  MOD_RES (3)..(3): Ser, Tyr, Trp, Arg or Phe
  MOD_RES (5)..(6): Ser, Tyr, Trp, Arg or Phe
  MOD_RES (8)..(8): Ser, Tyr, Trp, Arg or Phe
  MOD_RES (10)..(10): Ser, Tyr, Trp, Arg or Phe
  see specification as filed for detailed description of substitutions and preferred embodiments
XIXPXXSXTXYADSVKG

SEQ ID NO: 2643 - protein, 19 aa, Artificial Sequence
  Description of Artificial Sequence: Synthetic peptide
  MOD_RES (1)..(17): Ser, Tyr, Trp, Arg, Phe or not present
  MOD_RES (18)..(18): Ser, Tyr, Trp, Arg, Phe, Gly, Ala or not present
  MOD_RES (19)..(19): Ser, Tyr, Trp, Arg, Phe, Leu, Ile, Met or not present
  see specification as filed for detailed description of substitutions and preferred embodiments
XXXXXXXXXXXXXXXXXXX

SEQ ID NO: 2644 - protein, 10 aa, Artificial Sequence
  Description of Artificial Sequence: Synthetic peptide
  MOD_RES (4)..(9): Any amino acid other than Cys
  see specification as filed for detailed description of substitutions and preferred embodiments
GFNXXXXXXH

SEQ ID NO: 2645 - protein, 17 aa, Artificial Sequence
  Description of Artificial Sequence: Synthetic peptide
  MOD_RES (1)..(1): Any amino acid other than Cys
  MOD_RES (3)..(8): Any amino acid other than Cys
  MOD_RES (10)..(10): Any amino acid other than Cys
  see specification as filed for detailed description of substitutions and preferred embodiments
XIXXXXXXTXYADSVKG

SEQ ID NO: 2646 - protein, 10 aa, Artificial Sequence
  Description of Artificial Sequence: Synthetic peptide
  MOD_RES (1)..(8): Any amino acid other than Cys
  see specification as filed for detailed description of substitutions and preferred embodiments
XXXXXXXXDY

SEQ ID NO: 2647 - protein, 10 aa, Artificial Sequence
  Description of Artificial Sequence: Synthetic peptide
  MOD_RES (3)..(3): Any amino acid other than Cys
  MOD_RES (5)..(8): Any amino acid other than Cys
  see specification as filed for detailed description of substitutions and preferred embodiments
GFXIXXXXIH

SEQ ID NO: 2648 - protein, 17 aa, Artificial Sequence
  Description of Artificial Sequence: Synthetic peptide
  MOD_RES (1)..(1): Any amino acid other than Cys
  MOD_RES (3)..(3): Any amino acid other than Cys
  MOD_RES (5)..(6): Any amino acid other than Cys
  MOD_RES (8)..(8): Any amino acid other than Cys
  MOD_RES (10)..(10): Any amino acid other than Cys
  see specification as filed for detailed description of substitutions and preferred embodiments
XIXPXXGXTXYADSVKG

SEQ ID NO: 2649 - protein, 10 aa, Artificial Sequence
  Description of Artificial Sequence: Synthetic peptide
  MOD_RES (1)..(8): Any amino acid other than Cys
  see specification as filed for detailed description of substitutions and preferred embodiments
XXXXXXXXDY

SEQ ID NO: 2650 - protein, 17 aa, Artificial Sequence
  Description of Artificial Sequence: Synthetic peptide
  MOD_RES (1)..(1): Any amino acid other than Cys
  MOD_RES (3)..(3): Any amino acid other than Cys
  MOD_RES (5)..(6): Any amino acid other than Cys
  MOD_RES (8)..(8): Any amino acid other than Cys
  MOD_RES (10)..(10): Any amino acid other than Cys
  see specification as filed for detailed description of substitutions and preferred embodiments
XIXPXXSXTXYADSVKG

SEQ ID NO: 2651 - protein, 6 aa, Artificial Sequence
  Description of Artificial Sequence: Synthetic peptide
  MOD_RES (1)..(6): Any amino acid other than Cys
  see specification as filed for detailed description of substitutions and preferred embodiments
XXXXXX

SEQ ID NO: 2652 - protein, 11 aa, Artificial Sequence
  Description of Artificial Sequence: Synthetic peptide
  MOD_RES (3)..(6): Tyr or Ser
  MOD_RES (7)..(8): Tyr, Ser or not present
  MOD_RES (9)..(9): Pro or Leu
  MOD_RES (10)..(10): Phe, Leu, Ile or Val
QQXXXXXXXXT

SEQ ID NO: 2653 - protein, 9 aa, Artificial Sequence
  Description of Artificial Sequence: Synthetic peptide
  MOD_RES (3)..(6): Tyr or Ser
  MOD_RES (8)..(8): Tyr or Ser
QQXXXXPXT

SEQ ID NO: 2654 - protein, 9 aa, Artificial Sequence
  Description of Artificial Sequence: Synthetic peptide
  MOD_RES (3)..(6): Ser, Tyr, Trp, Arg or Phe
  MOD_RES (8)..(8): Ser, Tyr, Trp, Arg or Phe
  see specification as filed for detailed description of substitutions and preferred embodiments
QQXXXXPXT

SEQ ID NO: 2655 - protein, 9 aa, Artificial Sequence
  Description of Artificial Sequence: Synthetic peptide
  MOD_RES (3)..(8): Any amino acid other than Cys
  see specification as filed for detailed description of substitutions and preferred embodiments
QQXXXXXXT

SEQ ID NO: 2656 - protein, 9 aa, Artificial Sequence
  Description of Artificial Sequence: Synthetic peptide
  MOD_RES (3)..(6): Any amino acid other than Cys
  MOD_RES (8)..(8): Any amino acid other than Cys
  see specification as filed for detailed description of substitutions and preferred embodiments
QQXXXXPXT

SEQ ID NO: 2657 - protein, 17 aa, Artificial Sequence
  Description of Artificial Sequence: Synthetic peptide
  MOD_RES (1)..(1): Tyr or Ser
  MOD_RES (3)..(3): Tyr or Ser
  MOD_RES (5)..(6): Tyr or Ser
  MOD_RES (8)..(8): Tyr or Ser
  MOD_RES (10)..(10): Tyr or Ser
XIXPXXSXTXYADSVKG

SEQ ID NO: 2658 - protein, 21 aa, Artificial Sequence
  Description of Artificial Sequence: Synthetic peptide
  MOD_RES (1)..(5): Variable amino acid encoded by restriced codon sets
  MOD_RES (6)..(16): Variable amino acid encoded by restriced codon sets and this region may encompass 3 to 11 residues
  MOD_RES (17)..(19): Variable amino acid encoded by restriced codon sets
  see specification as filed for detailed description of substitutions and preferred embodiments
XXXXXXXXXXXXXXXXXXXDY
